United States Patent Application Publication US 2026/0308580 A1, published October 8, 2026 (application 19/535,511).

The application's sequence listing, which the Patent Office published only in electronic form, follows.

SEQUENCE LISTING (1023 sequences)

SEQ ID NO: 1 - RNA, 24 nt, synthetic construct
  misc_feature 1..24: note = Synthetic
  source 1..24: mol_type = other RNA
ctcagctacgtcccactggaagaa

SEQ ID NO: 2 - RNA, 24 nt, synthetic construct
  misc_feature 1..24: note = Synthetic
  source 1..24: mol_type = other RNA
ctaatcagcagcagtggtcagggg

SEQ ID NO: 3 - RNA, 24 nt, synthetic construct
  misc_feature 1..24: note = Synthetic
  source 1..24: mol_type = other RNA
taatcagcagcagtggtcaggggc

SEQ ID NO: 4 - RNA, 24 nt, synthetic construct
  misc_feature 1..24: note = Synthetic
  source 1..24: mol_type = other RNA
cagtggtcaggggcgcacccactg

SEQ ID NO: 5 - RNA, 24 nt, synthetic construct
  misc_feature 1..24: note = Synthetic
  source 1..24: mol_type = other RNA
ccagtgctgggcccccctgccagt

SEQ ID NO: 6 - RNA, 24 nt, synthetic construct
  misc_feature 1..24: note = Synthetic
  source 1..24: mol_type = other RNA
gggcccccctgccagtatagcctg

SEQ ID NO: 7 - RNA, 24 nt, synthetic construct
  misc_feature 1..24: note = Synthetic
  source 1..24: mol_type = other RNA
ccagtatagcctggggtcctgctg

SEQ ID NO: 8 - RNA, 24 nt, synthetic construct
  misc_feature 1..24: note = Synthetic
  source 1..24: mol_type = other RNA
ccctcctccggcatcgccgcggcg

SEQ ID NO: 9 - RNA, 24 nt, synthetic construct
  misc_feature 1..24: note = Synthetic
  source 1..24: mol_type = other RNA
tcctccggcatcgccgcggcgatc

SEQ ID NO: 10 - RNA, 24 nt, synthetic construct
  misc_feature 1..24: note = Synthetic
  source 1..24: mol_type = other RNA
gcgcttcgcacaggctcagcagca

SEQ ID NO: 11 - RNA, 24 nt, synthetic construct
  misc_feature 1..24: note = Synthetic
  source 1..24: mol_type = other RNA
accctgtgcccccaggacctcagc

SEQ ID NO: 12 - RNA, 24 nt, synthetic construct
  misc_feature 1..24: note = Synthetic
  source 1..24: mol_type = other RNA
aggaccccaggctatactggcagg

SEQ ID NO: 13 - RNA, 24 nt, synthetic construct
  misc_feature 1..24: note = Synthetic
  source 1..24: mol_type = other RNA
ggaccccaggctatactggcaggg

SEQ ID NO: 14 - RNA, 24 nt, synthetic construct
  misc_feature 1..24: note = Synthetic
  source 1..24: mol_type = other RNA
tatactggcaggggggcccagcac

SEQ ID NO: 15 - RNA, 24 nt, synthetic construct
  misc_feature 1..24: note = Synthetic
  source 1..24: mol_type = other RNA
tggcaggggggcccagcactgggc

SEQ ID NO: 16 - RNA, 24 nt, synthetic construct
  misc_feature 1..24: note = Synthetic
  source 1..24: mol_type = other RNA
tacatggtacacatccaggtgacg

SEQ ID NO: 17 - RNA, 24 nt, synthetic construct
  misc_feature 1..24: note = Synthetic
  source 1..24: mol_type = other RNA
cacatccaggtgacgctggccatc

SEQ ID NO: 18 - RNA, 24 nt, synthetic construct
  misc_feature 1..24: note = Synthetic
  source 1..24: mol_type = other RNA
atccaggtgacgctggccatctgc

SEQ ID NO: 19 - RNA, 24 nt, synthetic construct
  misc_feature 1..24: note = Synthetic
  source 1..24: mol_type = other RNA
agcttccaccaaggttgtaccatt

SEQ ID NO: 20 - RNA, 24 nt, synthetic construct
  misc_feature 1..24: note = Synthetic
  source 1..24: mol_type = other RNA
gcttccaccaaggttgtaccattg

SEQ ID NO: 21 - RNA, 24 nt, synthetic construct
  misc_feature 1..24: note = Synthetic
  source 1..24: mol_type = other RNA
accaaggttgtaccattgcctccc

SEQ ID NO: 22 - RNA, 24 nt, synthetic construct
  misc_feature 1..24: note = Synthetic
  source 1..24: mol_type = other RNA
ttgtaccattgcctcccagcgcct

SEQ ID NO: 23 - RNA, 24 nt, synthetic construct
  misc_feature 1..24: note = Synthetic
  source 1..24: mol_type = other RNA
tgtaccattgcctcccagcgcctg

SEQ ID NO: 24 - RNA, 24 nt, synthetic construct
  misc_feature 1..24: note = Synthetic
  source 1..24: mol_type = other RNA
gtaccattgcctcccagcgcctga

SEQ ID NO: 25 - RNA, 24 nt, synthetic construct
  misc_feature 1..24: note = Synthetic
  source 1..24: mol_type = other RNA
attgcctcccagcgcctgacgccc

SEQ ID NO: 26 - RNA, 24 nt, synthetic construct
  misc_feature 1..24: note = Synthetic
  source 1..24: mol_type = other RNA
ttgcctcccagcgcctgacgcccc

SEQ ID NO: 27 - RNA, 24 nt, synthetic construct
  misc_feature 1..24: note = Synthetic
  source 1..24: mol_type = other RNA
tggcccgaggggacacactctgca

SEQ ID NO: 28 - RNA, 24 nt, synthetic construct
  misc_feature 1..24: note = Synthetic
  source 1..24: mol_type = other RNA
cttttgccttcccgaaacactgat

SEQ ID NO: 29 - RNA, 24 nt, synthetic construct
  misc_feature 1..24: note = Synthetic
  source 1..24: mol_type = other RNA
gaccttctttggagtgcagtgggt

SEQ ID NO: 30 - RNA, 24 nt, synthetic construct
  misc_feature 1..24: note = Synthetic
  source 1..24: mol_type = other RNA
ctttggagtgcagtgggtgcgccc

SEQ ID NO: 31 - RNA, 24 nt, synthetic construct
  misc_feature 1..24: note = Synthetic
  source 1..24: mol_type = other RNA
cagagctggacaaggggcagctac

SEQ ID NO: 32 - RNA, 24 nt, synthetic construct
  misc_feature 1..24: note = Synthetic
  source 1..24: mol_type = other RNA
ctgcgtctcagcttccaccaaggt

SEQ ID NO: 33 - RNA, 24 nt, synthetic construct
  misc_feature 1..24: note = Synthetic
  source 1..24: mol_type = other RNA
ctcagcttccaccaaggttgtacc

SEQ ID NO: 34 - RNA, 24 nt, synthetic construct
  misc_feature 1..24: note = Synthetic
  source 1..24: mol_type = other RNA
cccctggcccgaggggacacactc

SEQ ID NO: 35 - RNA, 24 nt, synthetic construct
  misc_feature 1..24: note = Synthetic
  source 1..24: mol_type = other RNA
agaccttctttggagtgcagtggg

SEQ ID NO: 36 - RNA, 24 nt, synthetic construct
  misc_feature 1..24: note = Synthetic
  source 1..24: mol_type = other RNA
accttctttggagtgcagtgggtg

SEQ ID NO: 37 - RNA, 24 nt, synthetic construct
  misc_feature 1..24: note = Synthetic
  source 1..24: mol_type = other RNA
ccctgtgcccccaggacctcagca

SEQ ID NO: 38 - RNA, 24 nt, synthetic construct
  misc_feature 1..24: note = Synthetic
  source 1..24: mol_type = other RNA
cctgtgcccccaggacctcagcag

SEQ ID NO: 39-50 - skipped (12 entries)

SEQ ID NO: 51 - RNA, 101 nt, synthetic construct
  misc_feature 1..101: note = Synthetic
  source 1..101: mol_type = other RNA
ctcagctacgtcccactggaagaagttgtagctccctgaaaccgttgctacaataaggccgtcgaaagatgtgccgcaacgctctgccttctggcatcgtt

SEQ ID NO: 52 - RNA, 101 nt, synthetic construct; identical to SEQ ID NO: 51
  misc_feature 1..101: note = Synthetic
  modified_base 1: mod_base = OTHER; note = 2'-O-methyl nucleotide, phosphorothioate linkage
  modified_base 2: mod_base = OTHER; note = 2'-O-methyl nucleotide, phosphorothioate linkage
  modified_base 3: mod_base = OTHER; note = 2'-O-methyl nucleotide, phosphorothioate linkage
  modified_base 4: mod_base = OTHER; note = 2'-O-methyl nucleotide
  modified_base 5: mod_base = OTHER; note = 2'-O-methyl nucleotide
  modified_base 8: mod_base = OTHER; note = 2'-O-methyl nucleotide
  modified_base 9: mod_base = OTHER; note = 2'-O-methyl nucleotide
  modified_base 11: mod_base = OTHER; note = 2'-O-methyl nucleotide
  modified_base 13: mod_base = OTHER; note = 2'-O-methyl nucleotide
  modified_base 18: mod_base = OTHER; note = 2'-O-methyl nucleotide
  modified_base 22: mod_base = OTHER; note = 2'-O-methyl nucleotide
  modified_base 25: mod_base = OTHER; note = 2'-O-methyl nucleotide
  modified_base 29: mod_base = OTHER; note = 2'-O-methyl nucleotide
  modified_base 30: mod_base = OTHER; note = 2'-O-methyl nucleotide
  modified_base 31: mod_base = OTHER; note = 2'-O-methyl nucleotide
  modified_base 32: mod_base = OTHER; note = 2'-O-methyl nucleotide
  modified_base 37: mod_base = OTHER; note = 2'-O-methyl nucleotide
  modified_base 38: mod_base = OTHER; note = 2'-O-methyl nucleotide
  modified_base 39: mod_base = OTHER; note = 2'-O-methyl nucleotide
  modified_base 40: mod_base = OTHER; note = 2'-O-methyl nucleotide
  modified_base 41: mod_base = OTHER; note = 2'-O-methyl nucleotide
  modified_base 42: mod_base = OTHER; note = 2'-O-methyl nucleotide
  modified_base 43: mod_base = OTHER; note = 2'-O-methyl nucleotide
  modified_base 47: mod_base = OTHER; note = 2'-O-methyl nucleotide
  modified_base 48: mod_base = OTHER; note = 2'-O-methyl nucleotide
  modified_base 51: mod_base = OTHER; note = 2'-O-methyl nucleotide
  modified_base 54: mod_base = OTHER; note = phosphorothioate linkage
  modified_base 58: mod_base = OTHER; note = 2'-O-methyl nucleotide
  modified_base 59: mod_base = OTHER; note = 2'-O-methyl nucleotide
  modified_base 61: mod_base = OTHER; note = 2'-O-methyl nucleotide
  modified_base 62: mod_base = OTHER; note = 2'-O-methyl nucleotide
  modified_base 63: mod_base = OTHER; note = 2'-O-methyl nucleotide
  modified_base 64: mod_base = OTHER; note = 2'-O-methyl nucleotide
  modified_base 65: mod_base = OTHER; note = 2'-O-methyl nucleotide
  modified_base 66: mod_base = OTHER; note = 2'-O-methyl nucleotide
  modified_base 67: mod_base = OTHER; note = 2'-O-methyl nucleotide
  modified_base 68: mod_base = OTHER; note = 2'-O-methyl nucleotide
  modified_base 69: mod_base = OTHER; note = 2'-O-methyl nucleotide
  modified_base 70: mod_base = OTHER; note = 2'-O-methyl nucleotide
  modified_base 75: mod_base = OTHER; note = 2'-O-methyl nucleotide
  modified_base 77: mod_base = OTHER; note = 2'-O-methyl nucleotide
  modified_base 80: mod_base = OTHER; note = 2'-O-methyl nucleotide
  modified_base 86: mod_base = OTHER; note = 2'-O-methyl nucleotide
  modified_base 87: mod_base = OTHER; note = 2'-O-methyl nucleotide
  modified_base 89: mod_base = OTHER; note = 2'-O-methyl nucleotide
  modified_base 90: mod_base = OTHER; note = 2'-O-methyl nucleotide
  modified_base 91: mod_base = OTHER; note = 2'-O-methyl nucleotide
  modified_base 92: mod_base = OTHER; note = 2'-O-methyl nucleotide
  modified_base 99: mod_base = OTHER; note = phosphorothioate linkage
  modified_base 100: mod_base = OTHER; note = 2'-O-methyl nucleotide, phosphorothioate linkage
  modified_base 101: mod_base = OTHER; note = 2'-O-methyl nucleotide
  source 1..101: mol_type = other RNA

SEQ ID NO: 53 - RNA, 101 nt, synthetic construct; identical to SEQ ID NO: 51
  misc_feature 1..101: note = Synthetic
  modified_base 1: mod_base = OTHER; note = 2'-O-methyl nucleotide, phosphorothioate linkage
  modified_base 2: mod_base = OTHER; note = 2'-O-methyl nucleotide, phosphorothioate linkage
  modified_base 3: mod_base = OTHER; note = 2'-O-methyl nucleotide, phosphorothioate linkage
  modified_base 4: mod_base = OTHER; note = 2'-O-methyl nucleotide
  modified_base 5: mod_base = OTHER; note = 2'-O-methyl nucleotide
  modified_base 8: mod_base = OTHER; note = 2'-O-methyl nucleotide
  modified_base 9: mod_base = OTHER; note = 2'-O-methyl nucleotide
  modified_base 11: mod_base = OTHER; note = 2'-O-methyl nucleotide
  modified_base 13: mod_base = OTHER; note = 2'-O-methyl nucleotide
  modified_base 18: mod_base = OTHER; note = 2'-O-methyl nucleotide
  modified_base 22: mod_base = OTHER; note = 2'-O-methyl nucleotide
  modified_base 25: mod_base = OTHER; note = 2'-O-methyl nucleotide
  modified_base 29: mod_base = OTHER; note = 2'-O-methyl nucleotide
  modified_base 30: mod_base = OTHER; note = 2'-O-methyl nucleotide
  modified_base 31: mod_base = OTHER; note = 2'-O-methyl nucleotide
  modified_base 32: mod_base = OTHER; note = 2'-O-methyl nucleotide
  modified_base 37: mod_base = OTHER; note = 2'-O-methyl nucleotide
  modified_base 38: mod_base = OTHER; note = 2'-O-methyl nucleotide
  modified_base 39: mod_base = OTHER; note = 2'-O-methyl nucleotide
  modified_base 40: mod_base = OTHER; note = 2'-O-methyl nucleotide
  modified_base 41: mod_base = OTHER; note = 2'-O-methyl nucleotide
  modified_base 42: mod_base = OTHER; note = 2'-O-methyl nucleotide
  modified_base 43: mod_base = OTHER; note = 2'-O-methyl nucleotide
  modified_base 47: mod_base = OTHER; note = 2'-O-methyl nucleotide
  modified_base 48: mod_base = OTHER; note = 2'-O-methyl nucleotide
  modified_base 51: mod_base = OTHER; note = 2'-O-methyl nucleotide
  modified_base 58: mod_base = OTHER; note = 2'-O-methyl nucleotide
  modified_base 59: mod_base = OTHER; note = 2'-O-methyl nucleotide
  modified_base 61: mod_base = OTHER; note = 2'-O-methyl nucleotide
  modified_base 62: mod_base = OTHER; note = 2'-O-methyl nucleotide
  modified_base 63: mod_base = OTHER; note = 2'-O-methyl nucleotide
  modified_base 64: mod_base = OTHER; note = 2'-O-methyl nucleotide
  modified_base 65: mod_base = OTHER; note = 2'-O-methyl nucleotide
  modified_base 66: mod_base = OTHER; note = 2'-O-methyl nucleotide
  modified_base 67: mod_base = OTHER; note = 2'-O-methyl nucleotide
  modified_base 68: mod_base = OTHER; note = 2'-O-methyl nucleotide
  modified_base 69: mod_base = OTHER; note = 2'-O-methyl nucleotide
  modified_base 70: mod_base = OTHER; note = 2'-O-methyl nucleotide
  modified_base 75: mod_base = OTHER; note = 2'-O-methyl nucleotide
  modified_base 77: mod_base = OTHER; note = 2'-O-methyl nucleotide
  modified_base 80: mod_base = OTHER; note = 2'-O-methyl nucleotide
  modified_base 86: mod_base = OTHER; note = 2'-O-methyl nucleotide
  modified_base 87: mod_base = OTHER; note = 2'-O-methyl nucleotide
  modified_base 89: mod_base = OTHER; note = 2'-O-methyl nucleotide
  modified_base 90: mod_base = OTHER; note = 2'-O-methyl nucleotide
  modified_base 91: mod_base = OTHER; note = 2'-O-methyl nucleotide
  modified_base 92: mod_base = OTHER; note = 2'-O-methyl nucleotide
  modified_base 99: mod_base = OTHER; note = phosphorothioate linkage
  modified_base 100: mod_base = OTHER; note = 2'-O-methyl nucleotide, phosphorothioate linkage
  modified_base 101: mod_base = OTHER; note = 2'-O-methyl nucleotide
  source 1..101: mol_type = other RNA

SEQ ID NO: 54 - RNA, 101 nt, synthetic construct
  misc_feature 1..101: note = Synthetic
  source 1..101: mol_type = other RNA
tacatggtacacatccaggtgacggttgtagctccctgaaaccgttgctacaataaggccgtcgaaagatgtgccgcaacgctctgccttctggcatcgtt

SEQ ID NO: 55 - RNA, 101 nt, synthetic construct; identical to SEQ ID NO: 54
  misc_feature 1..101: note = Synthetic
  modified_base 1: mod_base = OTHER; note = 2'-O-methyl nucleotide, phosphorothioate linkage
  modified_base 2: mod_base = OTHER; note = 2'-O-methyl nucleotide, phosphorothioate linkage
  modified_base 3: mod_base = OTHER; note = 2'-O-methyl nucleotide, phosphorothioate linkage
  modified_base 4: mod_base = OTHER; note = 2'-O-methyl nucleotide
  modified_base 5: mod_base = OTHER; note = 2'-O-methyl nucleotide
  modified_base 8: mod_base = OTHER; note = 2'-O-methyl nucleotide
  modified_base 9: mod_base = OTHER; note = 2'-O-methyl nucleotide
  modified_base 11: mod_base = OTHER; note = 2'-O-methyl nucleotide
  modified_base 13: mod_base = OTHER; note = 2'-O-methyl nucleotide
  modified_base 18: mod_base = OTHER; note = 2'-O-methyl nucleotide
  modified_base 22: mod_base = OTHER; note = 2'-O-methyl nucleotide
  modified_base 25: mod_base = OTHER; note = 2'-O-methyl nucleotide
  modified_base 29: mod_base = OTHER; note = 2'-O-methyl nucleotide
  modified_base 30: mod_base = OTHER; note = 2'-O-methyl nucleotide
  modified_base 31: mod_base = OTHER; note = 2'-O-methyl nucleotide
  modified_base 32: mod_base = OTHER; note = 2'-O-methyl nucleotide
  modified_base 37: mod_base = OTHER; note = 2'-O-methyl nucleotide
  modified_base 38: mod_base = OTHER; note = 2'-O-methyl nucleotide
  modified_base 39: mod_base = OTHER; note = 2'-O-methyl nucleotide
  modified_base 40: mod_base = OTHER; note = 2'-O-methyl nucleotide
  modified_base 41: mod_base = OTHER; note = 2'-O-methyl nucleotide
  modified_base 42: mod_base = OTHER; note = 2'-O-methyl nucleotide
  modified_base 43: mod_base = OTHER; note = 2'-O-methyl nucleotide
  modified_base 47: mod_base = OTHER; note = 2'-O-methyl nucleotide
  modified_base 48: mod_base = OTHER; note = 2'-O-methyl nucleotide
  modified_base 51: mod_base = OTHER; note = 2'-O-methyl nucleotide
  modified_base 54: mod_base = OTHER; note = phosphorothioate linkage
  modified_base 58: mod_base = OTHER; note = 2'-O-methyl nucleotide
  modified_base 59: mod_base = OTHER; note = 2'-O-methyl nucleotide
  modified_base 61: mod_base = OTHER; note = 2'-O-methyl nucleotide
  modified_base 62: mod_base = OTHER; note = 2'-O-methyl nucleotide
  modified_base 63: mod_base = OTHER; note = 2'-O-methyl nucleotide
  modified_base 64: mod_base = OTHER; note = 2'-O-methyl nucleotide
  modified_base 65: mod_base = OTHER; note = 2'-O-methyl nucleotide
  modified_base 66: mod_base = OTHER; note = 2'-O-methyl nucleotide
  modified_base 67: mod_base = OTHER; note = 2'-O-methyl nucleotide
  modified_base 68: mod_base = OTHER; note = 2'-O-methyl nucleotide
  modified_base 69: mod_base = OTHER; note = 2'-O-methyl nucleotide
  modified_base 70: mod_base = OTHER; note = 2'-O-methyl nucleotide
  modified_base 75: mod_base = OTHER; note = 2'-O-methyl nucleotide
  modified_base 77: mod_base = OTHER; note = 2'-O-methyl nucleotide
  modified_base 80: mod_base = OTHER; note = 2'-O-methyl nucleotide
  modified_base 86: mod_base = OTHER; note = 2'-O-methyl nucleotide
  modified_base 87: mod_base = OTHER; note = 2'-O-methyl nucleotide
  modified_base 89: mod_base = OTHER; note = 2'-O-methyl nucleotide
  modified_base 90: mod_base = OTHER; note = 2'-O-methyl nucleotide
  modified_base 91: mod_base = OTHER; note = 2'-O-methyl nucleotide
  modified_base 92: mod_base = OTHER; note = 2'-O-methyl nucleotide
  modified_base 99: mod_base = OTHER; note = phosphorothioate linkage
  modified_base 100: mod_base = OTHER; note = 2'-O-methyl nucleotide, phosphorothioate linkage
  modified_base 101: mod_base = OTHER; note = 2'-O-methyl nucleotide
  source 1..101: mol_type = other RNA

SEQ ID NO: 56 - RNA, 101 nt, synthetic construct; identical to SEQ ID NO: 54
  misc_feature 1..101: note = Synthetic
  modified_base 1: mod_base = OTHER; note = 2'-O-methyl nucleotide, phosphorothioate linkage
  modified_base 2: mod_base = OTHER; note = 2'-O-methyl nucleotide, phosphorothioate linkage
  modified_base 3: mod_base = OTHER; note = 2'-O-methyl nucleotide, phosphorothioate linkage
  modified_base 4: mod_base = OTHER; note = 2'-O-methyl nucleotide
  modified_base 5: mod_base = OTHER; note = 2'-O-methyl nucleotide
  modified_base 8: mod_base = OTHER; note = 2'-O-methyl nucleotide
  modified_base 9: mod_base = OTHER; note = 2'-O-methyl nucleotide
  modified_base 11: mod_base = OTHER; note = 2'-O-methyl nucleotide
  modified_base 13: mod_base = OTHER; note = 2'-O-methyl nucleotide
  modified_base 18: mod_base = OTHER; note = 2'-O-methyl nucleotide
  modified_base 22: mod_base = OTHER; note = 2'-O-methyl nucleotide
  modified_base 25: mod_base = OTHER; note = 2'-O-methyl nucleotide
  modified_base 29: mod_base = OTHER; note = 2'-O-methyl nucleotide
  modified_base 30: mod_base = OTHER; note = 2'-O-methyl nucleotide
  modified_base 31: mod_base = OTHER; note = 2'-O-methyl nucleotide
  modified_base 32: mod_base = OTHER; note = 2'-O-methyl nucleotide
  modified_base 37: mod_base = OTHER; note = 2'-O-methyl nucleotide
  modified_base 38: mod_base = OTHER; note = 2'-O-methyl nucleotide
  modified_base 39: mod_base = OTHER; note = 2'-O-methyl nucleotide
  modified_base 40: mod_base = OTHER; note = 2'-O-methyl nucleotide
  modified_base 41: mod_base = OTHER; note = 2'-O-methyl nucleotide
  modified_base 42: mod_base = OTHER; note = 2'-O-methyl nucleotide
  modified_base 43: mod_base = OTHER; note = 2'-O-methyl nucleotide
  modified_base 47: mod_base = OTHER; note = 2'-O-methyl nucleotide
  modified_base 48: mod_base = OTHER; note = 2'-O-methyl nucleotide
  modified_base 51: mod_base = OTHER; note = 2'-O-methyl nucleotide
  modified_base 58: mod_base = OTHER; note = 2'-O-methyl nucleotide
  modified_base 59: mod_base = OTHER; note = 2'-O-methyl nucleotide
  modified_base 61: mod_base = OTHER; note = 2'-O-methyl nucleotide
  modified_base 62: mod_base = OTHER; note = 2'-O-methyl nucleotide
  modified_base 63: mod_base = OTHER; note = 2'-O-methyl nucleotide
  modified_base 64: mod_base = OTHER; note = 2'-O-methyl nucleotide
  modified_base 65: mod_base = OTHER; note = 2'-O-methyl nucleotide
  modified_base 66: mod_base = OTHER; note = 2'-O-methyl nucleotide
  modified_base 67: mod_base = OTHER; note = 2'-O-methyl nucleotide
  modified_base 68: mod_base = OTHER; note = 2'-O-methyl nucleotide
  modified_base 69: mod_base = OTHER; note = 2'-O-methyl nucleotide
  modified_base 70: mod_base = OTHER; note = 2'-O-methyl nucleotide
  modified_base 75: mod_base = OTHER; note = 2'-O-methyl nucleotide
  modified_base 77: mod_base = OTHER; note = 2'-O-methyl nucleotide
  modified_base 80: mod_base = OTHER; note = 2'-O-methyl nucleotide
  modified_base 86: mod_base = OTHER; note = 2'-O-methyl nucleotide
  modified_base 87: mod_base = OTHER; note = 2'-O-methyl nucleotide
  modified_base 89: mod_base = OTHER; note = 2'-O-methyl nucleotide
  modified_base 90: mod_base = OTHER; note = 2'-O-methyl nucleotide
  modified_base 91: mod_base = OTHER; note = 2'-O-methyl nucleotide
  modified_base 92: mod_base = OTHER; note = 2'-O-methyl nucleotide
  modified_base 99: mod_base = OTHER; note = phosphorothioate linkage
  modified_base 100: mod_base = OTHER; note = 2'-O-methyl nucleotide, phosphorothioate linkage
  modified_base 101: mod_base = OTHER; note = 2'-O-methyl nucleotide
  source 1..101: mol_type = other RNA

SEQ ID NO: 57-100 - skipped (44 entries)

SEQ ID NO: 101 - RNA, 20 nt, synthetic construct
  misc_feature 1..20: note = Synthetic
  source 1..20: mol_type = other RNA
ggtgatcgccgcggcgatgc

SEQ ID NO: 102 - RNA, 20 nt, synthetic construct
  misc_feature 1..20: note = Synthetic
  source 1..20: mol_type = other RNA
gatcgccgcggcgatgccgg

SEQ ID NO: 103 - RNA, 20 nt, synthetic construct
  misc_feature 1..20: note = Synthetic
  source 1..20: mol_type = other RNA
cgccgcggcgatgccggagg

SEQ ID NO: 104 - RNA, 20 nt, synthetic construct
  misc_feature 1..20: note = Synthetic
  source 1..20: mol_type = other RNA
gccgcggcgatgccggagga

SEQ ID NO: 105 - RNA, 20 nt, synthetic construct
  misc_feature 1..20: note = Synthetic
  source 1..20: mol_type = other RNA
accctcctccggcatcgccg

SEQ ID NO: 106 - RNA, 20 nt, synthetic construct
  misc_feature 1..20: note = Synthetic
  source 1..20: mol_type = other RNA
ggcgatgccggaggagggtt

SEQ ID NO: 107 - RNA, 20 nt, synthetic construct
  misc_feature 1..20: note = Synthetic
  source 1..20: mol_type = other RNA
gcgatgccggaggagggttc

SEQ ID NO: 108 - RNA, 20 nt, synthetic construct
  misc_feature 1..20: note = Synthetic
  source 1..20: mol_type = other RNA
ggaggagggttcgggctgct

SEQ ID NO: 109 - RNA, 20 nt, synthetic construct
  misc_feature 1..20: note = Synthetic
  source 1..20: mol_type = other RNA
agggttcgggctgctcggtg

SEQ ID NO: 110 - RNA, 20 nt, synthetic construct
  misc_feature 1..20: note = Synthetic
  source 1..20: mol_type = other RNA
cgggctgctcggtgcggcgc

SEQ ID NO: 111 - RNA, 20 nt, synthetic construct
  misc_feature 1..20: note = Synthetic
  source 1..20: mol_type = other RNA
tcggtgcggcgcaggcccta

SEQ ID NO: 112 - RNA, 20 nt, synthetic construct
  misc_feature 1..20: note = Synthetic
  source 1..20: mol_type = other RNA
cggtgcggcgcaggccctat

SEQ ID NO: 113 - RNA, 20 nt, synthetic construct
  misc_feature 1..20: note = Synthetic
  source 1..20: mol_type = other RNA
ggccctatgggtgcgtcctg

SEQ ID NO: 114 - RNA, 20 nt, synthetic construct
  misc_feature 1..20: note = Synthetic
  source 1..20: mol_type = other RNA
gccctatgggtgcgtcctgc

SEQ ID NO: 115 - RNA, 20 nt, synthetic construct
  misc_feature 1..20: note = Synthetic
  source 1..20: mol_type = other RNA
gcccgcaggacgcacccata

SEQ ID NO: 116 - RNA, 20 nt, synthetic construct
  misc_feature 1..20: note = Synthetic
  source 1..20: mol_type = other RNA
agcccgcaggacgcacccat

SEQ ID NO: 117 - RNA, 20 nt, synthetic construct
  misc_feature 1..20: note = Synthetic
  source 1..20: mol_type = other RNA
gtgcgtcctgcgggctgctt

SEQ ID NO: 118 - RNA, 20 nt, synthetic construct
  misc_feature 1..20: note = Synthetic
  source 1..20: mol_type = other RNA
gcgggctgctttggtcccat

SEQ ID NO: 119 - RNA, 20 nt, synthetic construct
  misc_feature 1..20: note = Synthetic
  source 1..20: mol_type = other RNA
tgctttggtcccattggtcg

SEQ ID NO: 120 - RNA, 20 nt, synthetic construct
  misc_feature 1..20: note = Synthetic
  source 1..20: mol_type = other RNA
gctttggtcccattggtcgc

SEQ ID NO: 121 - RNA, 20 nt, synthetic construct
  misc_feature 1..20: note = Synthetic
  source 1..20: mol_type = other RNA
ggtcccattggtcgcgggct

SEQ ID NO: 122 - RNA, 20 nt, synthetic construct
  misc_feature 1..20: note = Synthetic
  source 1..20: mol_type = other RNA
tcaccaagcccgcgaccaat

SEQ ID NO: 123 - RNA, 20 nt, synthetic construct
  misc_feature 1..20: note = Synthetic
  source 1..20: mol_type = other RNA
atcaccaagcccgcgaccaa

SEQ ID NO: 124 - RNA, 20 nt, synthetic construct
  misc_feature 1..20: note = Synthetic
  source 1..20: mol_type = other RNA
gggcttggtgatctgcctcg

SEQ ID NO: 125 - RNA, 20 nt, synthetic construct
  misc_feature 1..20: note = Synthetic
  source 1..20: mol_type = other RNA
gtgcatccagcgcttcgcac

SEQ ID NO: 126 - RNA, 20 nt, synthetic construct
  misc_feature 1..20: note = Synthetic
  source 1..20: mol_type = other RNA
gctgagcctgtgcgaagcgc

SEQ ID NO: 127 - RNA, 20 nt, synthetic construct
  misc_feature 1..20: note = Synthetic
  source 1..20: mol_type = other RNA
cagctgccgctcgagtcact

SEQ ID NO: 128 - RNA, 20 nt, synthetic construct
  misc_feature 1..20: note = Synthetic
  source 1..20: mol_type = other RNA
agctgccgctcgagtcactt

SEQ ID NO: 129 - RNA, 20 nt, synthetic construct
  misc_feature 1..20: note = Synthetic
  source 1..20: mol_type = other RNA
gaccccaggctatactggca

SEQ ID NO: 130 - RNA, 20 nt, synthetic construct
  misc_feature 1..20: note = Synthetic
  source 1..20: mol_type = other RNA
cccccctgccagtatagcct

SEQ ID NO: 131 - RNA, 20 nt, synthetic construct
  misc_feature 1..20: note = Synthetic
  source 1..20: mol_type = other RNA
ccatcgtgatggcatctaca

SEQ ID NO: 132 - RNA, 20 nt, synthetic construct
  misc_feature 1..20: note = Synthetic
  source 1..20: mol_type = other RNA
ccatgtagatgccatcacga

SEQ ID NO: 133 - RNA, 20 nt, synthetic construct
  misc_feature 1..20: note = Synthetic
  source 1..20: mol_type = other RNA
catctacatggtacacatcc

SEQ ID NO: 134 - RNA, 20 nt, synthetic construct
  misc_feature 1..20: note = Synthetic
  source 1..20: mol_type = other RNA
ggtacacatccaggtgacgc

SEQ ID NO: 135 - RNA, 20 nt, synthetic construct
  misc_feature 1..20: note = Synthetic
  source 1..20: mol_type = other RNA
agagcagattcccacggcca

SEQ ID NO: 136 - RNA, 20 nt, synthetic construct
  misc_feature 1..20: note = Synthetic
  source 1..20: mol_type = other RNA
cagcaggctgatgctacggg

SEQ ID NO: 137 - RNA, 20 nt, synthetic construct
  misc_feature 1..20: note = Synthetic
  source 1..20: mol_type = other RNA
aggcaatggtacaaccttgg

SEQ ID NO: 138 - RNA, 20 nt, synthetic construct
  misc_feature 1..20: note = Synthetic
  source 1..20: mol_type = other RNA
agagtgtgtcccctcgggcc

SEQ ID NO: 139 - RNA, 20 nt, synthetic construct
  misc_feature 1..20: note = Synthetic
  source 1..20: mol_type = other RNA
gtctcatcagtgtttcggga

SEQ ID NO: 140 - RNA, 20 nt, synthetic construct
  misc_feature 1..20: note = Synthetic
  source 1..20: mol_type = other RNA
gctgaatcacacaggtaaca

SEQ ID NO: 141 - RNA, 20 nt, synthetic construct
  misc_feature 1..20: note = Synthetic
  source 1..20: mol_type = other RNA
ctgaatcacacaggtaacac

SEQ ID NO: 142 - RNA, 20 nt, synthetic construct
  misc_feature 1..20: note = Synthetic
  source 1..20: mol_type = other RNA
tgaatcacacaggtaacacg

SEQ ID NO: 143 - RNA, 20 nt, synthetic construct
  misc_feature 1..20: note = Synthetic
  source 1..20: mol_type = other RNA
gaatcacacaggtaacacgg

SEQ ID NO: 144 - RNA, 20 nt, synthetic construct
  misc_feature 1..20: note = Synthetic
  source 1..20: mol_type = other RNA
cacaggtaacacgggggacg

SEQ ID NO: 145 - RNA, 20 nt, synthetic construct
  misc_feature 1..20: note = Synthetic
  source 1..20: mol_type = other RNA
aggtaacacgggggacgtgg

SEQ ID NO: 146 - RNA, 20 nt, synthetic construct
  misc_feature 1..20: note = Synthetic
  source 1..20: mol_type = other RNA
ggtaacacgggggacgtgga

SEQ ID NO: 147 - RNA, 20 nt, synthetic construct
  misc_feature 1..20: note = Synthetic
  source 1..20: mol_type = other RNA
cacgggggacgtggagggac

SEQ ID NO: 148 - RNA, 20 nt, synthetic construct
  misc_feature 1..20: note = Synthetic
  source 1..20: mol_type = other RNA
gctgccgctcgagtcacttg

SEQ ID NO: 149 - RNA, 20 nt, synthetic construct
  misc_feature 1..20: note = Synthetic
  source 1..20: mol_type = other RNA
gaagaaaagaccagaaaaca

SEQ ID NO: 150 - RNA, 20 nt, synthetic construct
  misc_feature 1..20: note = Synthetic
  source 1..20: mol_type = other RNA
ggaagaaaagaccagaaaac

SEQ ID NO: 151 - RNA, 20 nt, synthetic construct
  misc_feature 1..20: note = Synthetic
  source 1..20: mol_type = other RNA
ttctggtcttttcttccagt

SEQ ID NO: 152 - RNA, 20 nt, synthetic construct
  misc_feature 1..20: note = Synthetic
  source 1..20: mol_type = other RNA
acacgggggacgtggaggga

SEQ ID NO: 153 - RNA, 20 nt, synthetic construct
  misc_feature 1..20: note = Synthetic
  source 1..20: mol_type = other RNA
acgggggacgtggagggacg

SEQ ID NO: 154 - RNA, 20 nt, synthetic construct
  misc_feature 1..20: note = Synthetic
  source 1..20: mol_type = other RNA
cacagggttagagggatgag

SEQ ID NO: 155 - RNA, 20 nt, synthetic construct
  misc_feature 1..20: note = Synthetic
  source 1..20: mol_type = other RNA
cctgggggcacagggttaga

SEQ ID NO: 156 - RNA, 20 nt, synthetic construct
  misc_feature 1..20: note = Synthetic
  source 1..20: mol_type = other RNA
tcctgggggcacagggttag

SEQ ID NO: 157 - RNA, 20 nt, synthetic construct
  misc_feature 1..20: note = Synthetic
  source 1..20: mol_type = other RNA
gctgaggtcctgggggcaca

SEQ ID NO: 158 - RNA, 20 nt, synthetic construct
  misc_feature 1..20: note = Synthetic
  source 1..20: mol_type = other RNA
tgtgcccccaggacctcagc

SEQ ID NO: 159 - RNA, 20 nt, synthetic construct
  misc_feature 1..20: note = Synthetic
  source 1..20: mol_type = other RNA
tgctgaggtcctgggggcac

SEQ ID NO: 160 - RNA, 20 nt, synthetic construct
  misc_feature 1..20: note = Synthetic
  source 1..20: mol_type = other RNA
caggacctcagcaggacccc

SEQ ID NO: 161 - RNA, 20 nt, synthetic construct
  misc_feature 1..20: note = Synthetic
  source 1..20: mol_type = other RNA
tatagcctggggtcctgctg

SEQ ID NO: 162 - RNA, 20 nt, synthetic construct
  misc_feature 1..20: note = Synthetic
  source 1..20: mol_type = other RNA
agcaggaccccaggctatac

SEQ ID NO: 163 - RNA, 20 nt, synthetic construct
  misc_feature 1..20: note = Synthetic
  source 1..20: mol_type = other RNA
ggaccccaggctatactggc

SEQ ID NO: 164 - RNA, 20 nt, synthetic construct
  misc_feature 1..20: note = Synthetic
  source 1..20: mol_type = other RNA
ccccctgccagtatagcctg

SEQ ID NO: 165 - RNA, 20 nt, synthetic construct
  misc_feature 1..20: note = Synthetic
  source 1..20: mol_type = other RNA
gcccccctgccagtatagcc

SEQ ID NO: 166 - RNA, 20 nt, synthetic construct
  misc_feature 1..20: note = Synthetic
  source 1..20: mol_type = other RNA
ctggcaggggggcccagcac

SEQ ID NO: 167 - RNA, 20 nt, synthetic construct
  misc_feature 1..20: note = Synthetic
  source 1..20: mol_type = other RNA
tggcaggggggcccagcact

SEQ ID NO: 168 - RNA, 20 nt, synthetic construct
  misc_feature 1..20: note = Synthetic
  source 1..20: mol_type = other RNA
ctcccagcgcctgacgcccc

SEQ ID NO: 169 - RNA, 20 nt, synthetic construct
  misc_feature 1..20: note = Synthetic
  source 1..20: mol_type = other RNA
cacccactgcactccaaaga

SEQ ID NO: 170-300 - skipped (131 entries)

SEQ ID NO: 301 - RNA, 24 nt, synthetic construct
  misc_feature 1..24: note = Synthetic
  source 1..24: mol_type = other RNA
cgagatgtcatttcccagagcacc

SEQ ID NO: 302 - RNA, 20 nt, synthetic construct
  misc_feature 1..20: note = Synthetic
  source 1..20: mol_type = other RNA
tcgctttgctgaggtctata

SEQ ID NO: 303 - RNA, 20 nt, synthetic construct
  misc_feature 1..20: note = Synthetic
  source 1..20: mol_type = other RNA
tctactgctaccgcgttaac

SEQ ID NO: 304-320 - skipped (17 entries)

SEQ ID NO: 321 - RNA, 101 nt, synthetic construct
  misc_feature 1..101: note = Synthetic
  source 1..101: mol_type = other RNA
cgagatgtcatttcccagagcaccgttgtagctccctgaaaccgttgctacaataaggccgtcgaaagatgtgccgcaacgctctgccttctggcatcgtt

SEQ ID NO: 322 - RNA, 100 nt, synthetic construct
  misc_feature 1..100: note = Synthetic
  source 1..100: mol_type = other RNA
tcgctttgctgaggtctatagttttagagctagaaatagcaagttaaaataaggctagtccgttatcaacttgaaaaagtggcaccgagtcggtgctttt

SEQ ID NO: 323 - RNA, 100 nt, synthetic construct
  misc_feature 1..100: note = Synthetic
  source 1..100: mol_type = other RNA
tctactgctaccgcgttaacgttttagagctagaaatagcaagttaaaataaggctagtccgttatcaacttgaaaaagtggcaccgagtcggtgctttt

SEQ ID NO: 324-340 - skipped (17 entries)

SEQ ID NO: 341 - RNA, 101 nt, synthetic construct; identical to SEQ ID NO: 321
  misc_feature 1..101: note = Synthetic
  modified_base 1: mod_base = OTHER; note = 2'-O-methyl nucleotide, phosphorothioate linkage
  modified_base 2: mod_base = OTHER; note = 2'-O-methyl nucleotide, phosphorothioate linkage
  modified_base 3: mod_base = OTHER; note = 2'-O-methyl nucleotide, phosphorothioate linkage
  modified_base 4: mod_base = OTHER; note = 2'-O-methyl nucleotide
  modified_base 5: mod_base = OTHER; note = 2'-O-methyl nucleotide
  modified_base 8: mod_base = OTHER; note = 2'-O-methyl nucleotide
  modified_base 9: mod_base = OTHER; note = 2'-O-methyl nucleotide
  modified_base 11: mod_base = OTHER; note = 2'-O-methyl nucleotide
  modified_base 13: mod_base = OTHER; note = 2'-O-methyl nucleotide
  modified_base 18: mod_base = OTHER; note = 2'-O-methyl nucleotide
  modified_base 22: mod_base = OTHER; note = 2'-O-methyl nucleotide
  modified_base 25: mod_base = OTHER; note = 2'-O-methyl nucleotide
  modified_base 29: mod_base = OTHER; note = 2'-O-methyl nucleotide
  modified_base 30: mod_base = OTHER; note = 2'-O-methyl nucleotide
  modified_base 31: mod_base = OTHER; note = 2'-O-methyl nucleotide
  modified_base 32: mod_base = OTHER; note = 2'-O-methyl nucleotide
  modified_base 37: mod_base = OTHER; note = 2'-O-methyl nucleotide
  modified_base 38: mod_base = OTHER; note = 2'-O-methyl nucleotide
  modified_base 39: mod_base = OTHER; note = 2'-O-methyl nucleotide
  modified_base 40: mod_base = OTHER; note = 2'-O-methyl nucleotide
  modified_base 41: mod_base = OTHER; note = 2'-O-methyl nucleotide
  modified_base 42: mod_base = OTHER; note = 2'-O-methyl nucleotide
  modified_base 43: mod_base = OTHER; note = 2'-O-methyl nucleotide
  modified_base 47: mod_base = OTHER; note = 2'-O-methyl nucleotide
  modified_base 48: mod_base = OTHER; note = 2'-O-methyl nucleotide
  modified_base 51: mod_base = OTHER; note = 2'-O-methyl nucleotide
  modified_base 54: mod_base = OTHER; note = phosphorothioate linkage
  modified_base 58: mod_base = OTHER; note = 2'-O-methyl nucleotide
  modified_base 59: mod_base = OTHER; note = 2'-O-methyl nucleotide
  modified_base 61: mod_base = OTHER; note = 2'-O-methyl nucleotide
  modified_base 62: mod_base = OTHER; note = 2'-O-methyl nucleotide
  modified_base 63: mod_base = OTHER; note = 2'-O-methyl nucleotide
  modified_base 64: mod_base = OTHER; note = 2'-O-methyl nucleotide
  modified_base 65: mod_base = OTHER; note = 2'-O-methyl nucleotide
  modified_base 66: mod_base = OTHER; note = 2'-O-methyl nucleotide
  modified_base 67: mod_base = OTHER; note = 2'-O-methyl nucleotide
  modified_base 68: mod_base = OTHER; note = 2'-O-methyl nucleotide
  modified_base 69: mod_base = OTHER; note = 2'-O-methyl nucleotide
  modified_base 70: mod_base = OTHER; note = 2'-O-methyl nucleotide
  modified_base 75: mod_base = OTHER; note = 2'-O-methyl nucleotide
  modified_base 77: mod_base = OTHER; note = 2'-O-methyl nucleotide
  modified_base 80: mod_base = OTHER; note = 2'-O-methyl nucleotide
  modified_base 86: mod_base = OTHER; note = 2'-O-methyl nucleotide
  modified_base 87: mod_base = OTHER; note = 2'-O-methyl nucleotide
  modified_base 89: mod_base = OTHER; note = 2'-O-methyl nucleotide
  modified_base 90: mod_base = OTHER; note = 2'-O-methyl nucleotide
  modified_base 91: mod_base = OTHER; note = 2'-O-methyl nucleotide
  modified_base 92: mod_base = OTHER; note = 2'-O-methyl nucleotide
  modified_base 99: mod_base = OTHER; note = phosphorothioate linkage
  modified_base 100: mod_base = OTHER; note = 2'-O-methyl nucleotide, phosphorothioate linkage
  modified_base 101: mod_base = OTHER; note = 2'-O-methyl nucleotide
  source 1..101: mol_type = other RNA

SEQ ID NO: 342 - RNA, 101 nt, synthetic construct; identical to SEQ ID NO: 321
  misc_feature 1..101: note = Synthetic
  modified_base 1: mod_base = OTHER; note = 2'-O-methyl nucleotide, phosphorothioate linkage
  modified_base 2: mod_base = OTHER; note = 2'-O-methyl nucleotide, phosphorothioate linkage
  modified_base 3: mod_base = OTHER; note = 2'-O-methyl nucleotide, phosphorothioate linkage
  modified_base 4: mod_base = OTHER; note = 2'-O-methyl nucleotide
  modified_base 5: mod_base = OTHER; note = 2'-O-methyl nucleotide
  modified_base 8: mod_base = OTHER; note = 2'-O-methyl nucleotide
  modified_base 9: mod_base = OTHER; note = 2'-O-methyl nucleotide
  modified_base 11: mod_base = OTHER; note = 2'-O-methyl nucleotide
  modified_base 13: mod_base = OTHER; note = 2'-O-methyl nucleotide
  modified_base 18: mod_base = OTHER; note = 2'-O-methyl nucleotide
  modified_base 22: mod_base = OTHER; note = 2'-O-methyl nucleotide
  modified_base 25: mod_base = OTHER; note = 2'-O-methyl nucleotide
  modified_base 29: mod_base = OTHER; note = 2'-O-methyl nucleotide
  modified_base 30: mod_base = OTHER; note = 2'-O-methyl nucleotide
  modified_base 31: mod_base = OTHER; note = 2'-O-methyl nucleotide
  modified_base 32: mod_base = OTHER; note = 2'-O-methyl nucleotide
  modified_base 37: mod_base = OTHER; note = 2'-O-methyl nucleotide
  modified_base 38: mod_base = OTHER; note = 2'-O-methyl nucleotide
  modified_base 39: mod_base = OTHER; note = 2'-O-methyl nucleotide
  modified_base 40: mod_base = OTHER; note = 2'-O-methyl nucleotide
  modified_base 41: mod_base = OTHER; note = 2'-O-methyl nucleotide
  modified_base 42: mod_base = OTHER; note = 2'-O-methyl nucleotide
  modified_base 43: mod_base = OTHER; note = 2'-O-methyl nucleotide
  modified_base 47: mod_base = OTHER; note = 2'-O-methyl nucleotide
  modified_base 48: mod_base = OTHER; note = 2'-O-methyl nucleotide
  modified_base 51: mod_base = OTHER; note = 2'-O-methyl nucleotide
  modified_base 58: mod_base = OTHER; note = 2'-O-methyl nucleotide
  modified_base 59: mod_base = OTHER; note = 2'-O-methyl nucleotide
  modified_base 61: mod_base = OTHER; note = 2'-O-methyl nucleotide
  modified_base 62: mod_base = OTHER; note = 2'-O-methyl nucleotide
  modified_base 63: mod_base = OTHER; note = 2'-O-methyl nucleotide
  modified_base 64: mod_base = OTHER; note = 2'-O-methyl nucleotide
  modified_base 65: mod_base = OTHER; note = 2'-O-methyl nucleotide
  modified_base 66: mod_base = OTHER; note = 2'-O-methyl nucleotide
  modified_base 67: mod_base = OTHER; note = 2'-O-methyl nucleotide
  modified_base 68: mod_base = OTHER; note = 2'-O-methyl nucleotide
  modified_base 69: mod_base = OTHER; note = 2'-O-methyl nucleotide
  modified_base 70: mod_base = OTHER; note = 2'-O-methyl nucleotide
  modified_base 75: mod_base = OTHER; note = 2'-O-methyl nucleotide
  modified_base 77: mod_base = OTHER; note = 2'-O-methyl nucleotide
  modified_base 80: mod_base = OTHER; note = 2'-O-methyl nucleotide
  modified_base 86: mod_base = OTHER; note = 2'-O-methyl nucleotide
  modified_base 87: mod_base = OTHER; note = 2'-O-methyl nucleotide
  modified_base 89: mod_base = OTHER; note = 2'-O-methyl nucleotide
  modified_base 90: mod_base = OTHER; note = 2'-O-methyl nucleotide
  modified_base 91: mod_base = OTHER; note = 2'-O-methyl nucleotide
  modified_base 92: mod_base = OTHER; note = 2'-O-methyl nucleotide
  modified_base 99: mod_base = OTHER; note = phosphorothioate linkage
  modified_base 100: mod_base = OTHER; note = 2'-O-methyl nucleotide, phosphorothioate linkage
  modified_base 101: mod_base = OTHER; note = 2'-O-methyl nucleotide
  source 1..101: mol_type = other RNA

SEQ ID NO: 343 - RNA, 100 nt, synthetic construct; identical to SEQ ID NO: 322
  misc_feature 1..100: note = Synthetic
  modified_base 1: mod_base = OTHER; note = 2'-O-methyl nucleotide, phosphorothioate linkage
  modified_base 2: mod_base = OTHER; note = 2'-O-methyl nucleotide, phosphorothioate linkage
  modified_base 3: mod_base = OTHER; note = 2'-O-methyl nucleotide, phosphorothioate linkage
  modified_base 29: mod_base = OTHER; note = 2'-O-methyl nucleotide
  modified_base 30: mod_base = OTHER; note = 2'-O-methyl nucleotide
  modified_base 31: mod_base = OTHER; note = 2'-O-methyl nucleotide
  modified_base 32: mod_base = OTHER; note = 2'-O-methyl nucleotide
  modified_base 33: mod_base = OTHER; note = 2'-O-methyl nucleotide
  modified_base 34: mod_base = OTHER; note = 2'-O-methyl nucleotide
  modified_base 35: mod_base = OTHER; note = 2'-O-methyl nucleotide
  modified_base 36: mod_base = OTHER; note = 2'-O-methyl nucleotide
  modified_base 37: mod_base = OTHER; note = 2'-O-methyl nucleotide
  modified_base 38: mod_base = OTHER; note = 2'-O-methyl nucleotide
  modified_base 39: mod_base = OTHER; note = 2'-O-methyl nucleotide
  modified_base 40: mod_base = OTHER; note = 2'-O-methyl nucleotide
  modified_base 69: mod_base = OTHER; note = 2'-O-methyl nucleotide
  modified_base 70: mod_base = OTHER; note = 2'-O-methyl nucleotide
  modified_base 71: mod_base = OTHER; note = 2'-O-methyl nucleotide
  modified_base 72: mod_base = OTHER; note = 2'-O-methyl nucleotide
  modified_base 73: mod_base = OTHER; note = 2'-O-methyl nucleotide
  modified_base 74: mod_base = OTHER; note = 2'-O-methyl nucleotide
  modified_base 75: mod_base = OTHER; note = 2'-O-methyl nucleotide
  modified_base 76: mod_base = OTHER; note = 2'-O-methyl nucleotide
  modified_base 77: mod_base = OTHER; note = 2'-O-methyl nucleotide
  modified_base 78: mod_base = OTHER; note = 2'-O-methyl nucleotide
  modified_base 79: mod_base = OTHER; note = 2'-O-methyl nucleotide
  modified_base 80: mod_base = OTHER; note = 2'-O-methyl nucleotide
  modified_base 81: mod_base = OTHER; note = 2'-O-methyl nucleotide
  modified_base 82: mod_base = OTHER; note = 2'-O-methyl nucleotide
  modified_base 83: mod_base = OTHER; note = 2'-O-methyl nucleotide
  modified_base 84: mod_base = OTHER; note = 2'-O-methyl nucleotide
  modified_base 85: mod_base = OTHER; note = 2'-O-methyl nucleotide
  modified_base 86: mod_base = OTHER; note = 2'-O-methyl nucleotide
  modified_base 87: mod_base = OTHER; note = 2'-O-methyl nucleotide
  modified_base 88: mod_base = OTHER; note = 2'-O-methyl nucleotide
  modified_base 89: mod_base = OTHER; note = 2'-O-methyl nucleotide
  modified_base 90: mod_base = OTHER; note = 2'-O-methyl nucleotide
  modified_base 91: mod_base = OTHER; note = 2'-O-methyl nucleotide
  modified_base 92: mod_base = OTHER; note = 2'-O-methyl nucleotide
  modified_base 93: mod_base = OTHER; note = 2'-O-methyl nucleotide
  modified_base 94: mod_base = OTHER; note = 2'-O-methyl nucleotide
  modified_base 95: mod_base = OTHER; note = 2'-O-methyl nucleotide
  modified_base 96: mod_base = OTHER; note = 2'-O-methyl nucleotide
  modified_base 97: mod_base = OTHER; note = 2'-O-methyl nucleotide, phosphorothioate linkage
  modified_base 98: mod_base = OTHER; note = 2'-O-methyl nucleotide, phosphorothioate linkage
  modified_base 99: mod_base = OTHER; note = 2'-O-methyl nucleotide, phosphorothioate linkage
  modified_base 100: mod_base = OTHER; note = 2'-O-methyl nucleotide
  source 1..100: mol_type = other RNA

SEQ ID NO: 344 - RNA, 91 nt, synthetic construct
  misc_feature 1..91: note = Synthetic
  modified_base 1: mod_base = OTHER; note = 2'-O-methyl nucleotide, phosphorothioate linkage
  modified_base 2: mod_base = OTHER; note = 2'-O-methyl nucleotide, phosphorothioate linkage
  modified_base 3: mod_base = OTHER; note = 2'-O-methyl nucleotide, phosphorothioate linkage
  modified_base 29: mod_base = OTHER; note = 2'-O-methyl nucleotide
  modified_base 30: mod_base = OTHER; note = 2'-O-methyl nucleotide
  modified_base 31: mod_base = OTHER; note = 2'-O-methyl nucleotide
  modified_base 32: mod_base = OTHER; note = 2'-O-methyl nucleotide
  modified_base 33: mod_base = OTHER; note = 2'-O-methyl nucleotide
  modified_base 34: mod_base = OTHER; note = 2'-O-methyl nucleotide
  modified_base 35: mod_base = OTHER; note = 2'-O-methyl nucleotide
  modified_base 36: mod_base = OTHER; note = 2'-O-methyl nucleotide
  modified_base 37: mod_base = OTHER; note = 2'-O-methyl nucleotide
  modified_base 38: mod_base = OTHER; note = 2'-O-methyl nucleotide
  modified_base 39: mod_base = OTHER; note = 2'-O-methyl nucleotide
  modified_base 40: mod_base = OTHER; note = 2'-O-methyl nucleotide
  modified_base 88: mod_base = OTHER; note = 2'-O-methyl nucleotide, phosphorothioate linkage
  modified_base 89: mod_base = OTHER; note = 2'-O-methyl nucleotide, phosphorothioate linkage
  modified_base 90: mod_base = OTHER; note = 2'-O-methyl nucleotide, phosphorothioate linkage
  modified_base 91: mod_base = OTHER; note = 2'-O-methyl nucleotide
  source 1..91: mol_type = other RNA
tgggaggacctgcgcaagctgttttagagctagaaatagcaagttaaaataaggctagtccgttatcacgaaagggcaccgagtcggtgct

SEQ ID NO: 345 - RNA, 100 nt, synthetic construct; identical to SEQ ID NO: 323
  misc_feature 1..100: note = Synthetic
  modified_base 1: mod_base = OTHER; note = 2'-O-methyl nucleotide, phosphorothioate linkage
  modified_base 2: mod_base = OTHER; note = 2'-O-methyl nucleotide, phosphorothioate linkage
  modified_base 3: mod_base = OTHER; note = 2'-O-methyl nucleotide, phosphorothioate linkage
  modified_base 29: mod_base = OTHER; note = 2'-O-methyl nucleotide
  modified_base 30: mod_base = OTHER; note = 2'-O-methyl nucleotide
  modified_base 31: mod_base = OTHER; note = 2'-O-methyl nucleotide
  modified_base 32: mod_base = OTHER; note = 2'-O-methyl nucleotide
  modified_base 33: mod_base = OTHER; note = 2'-O-methyl nucleotide
  modified_base 34: mod_base = OTHER; note = 2'-O-methyl nucleotide
  modified_base 35: mod_base = OTHER; note = 2'-O-methyl nucleotide
  modified_base 36: mod_base = OTHER; note = 2'-O-methyl nucleotide
  modified_base 37: mod_base = OTHER; note = 2'-O-methyl nucleotide
  modified_base 38: mod_base = OTHER; note = 2'-O-methyl nucleotide
  modified_base 39: mod_base = OTHER; note = 2'-O-methyl nucleotide
  modified_base 40: mod_base = OTHER; note = 2'-O-methyl nucleotide
  modified_base 69: mod_base = OTHER; note = 2'-O-methyl nucleotide
  modified_base 70: mod_base = OTHER; note = 2'-O-methyl nucleotide
  modified_base 71: mod_base = OTHER; note = 2'-O-methyl nucleotide
  modified_base 72: mod_base = OTHER; note = 2'-O-methyl nucleotide
  modified_base 73: mod_base = OTHER; note = 2'-O-methyl nucleotide
  modified_base 74: mod_base = OTHER; note = 2'-O-methyl nucleotide
  modified_base 75: mod_base = OTHER; note = 2'-O-methyl nucleotide
  modified_base 76: mod_base = OTHER; note = 2'-O-methyl nucleotide
  modified_base 77: mod_base = OTHER; note = 2'-O-methyl nucleotide
  modified_base 78: mod_base = OTHER; note = 2'-O-methyl nucleotide
  modified_base 79: mod_base = OTHER; note = 2'-O-methyl nucleotide
  modified_base 80: mod_base = OTHER; note = 2'-O-methyl nucleotide
  modified_base 81: mod_base = OTHER; note = 2'-O-methyl nucleotide
  modified_base 82: mod_base = OTHER; note = 2'-O-methyl nucleotide
  modified_base 83: mod_base = OTHER; note = 2'-O-methyl nucleotide
  modified_base 84: mod_base = OTHER; note = 2'-O-methyl nucleotide
  modified_base 85: mod_base = OTHER; note = 2'-O-methyl nucleotide
  modified_base 86: mod_base = OTHER; note = 2'-O-methyl nucleotide
  modified_base 87: mod_base = OTHER; note = 2'-O-methyl nucleotide
  modified_base 88: mod_base = OTHER; note = 2'-O-methyl nucleotide
  modified_base 89: mod_base = OTHER; note = 2'-O-methyl nucleotide
  modified_base 90: mod_base = OTHER; note = 2'-O-methyl nucleotide
  modified_base 91: mod_base = OTHER; note = 2'-O-methyl nucleotide
  modified_base 92: mod_base = OTHER; note = 2'-O-methyl nucleotide
  modified_base 93: mod_base = OTHER; note = 2'-O-methyl nucleotide
  modified_base 94: mod_base = OTHER; note = 2'-O-methyl nucleotide
  modified_base 95: mod_base = OTHER; note = 2'-O-methyl nucleotide
  modified_base 96: mod_base = OTHER; note = 2'-O-methyl nucleotide
  modified_base 97: mod_base = OTHER; note = 2'-O-methyl nucleotide, phosphorothioate linkage
  modified_base 98: mod_base = OTHER; note = 2'-O-methyl nucleotide, phosphorothioate linkage
  modified_base 99: mod_base = OTHER; note = 2'-O-methyl nucleotide, phosphorothioate linkage
  modified_base 100: mod_base = OTHER; note = 2'-O-methyl nucleotide
  source 1..100: mol_type = other RNA

SEQ ID NO: 346 - RNA, 91 nt, synthetic construct
  misc_feature 1..91: note = Synthetic
  modified_base 1: mod_base = OTHER; note = 2'-O-methyl nucleotide, phosphorothioate linkage
  modified_base 2: mod_base = OTHER; note = 2'-O-methyl nucleotide, phosphorothioate linkage
  modified_base 3: mod_base = OTHER; note = 2'-O-methyl nucleotide, phosphorothioate linkage
  modified_base 29: mod_base = OTHER; note = 2'-O-methyl nucleotide
  modified_base 30: mod_base = OTHER; note = 2'-O-methyl nucleotide
  modified_base 31: mod_base = OTHER; note = 2'-O-methyl nucleotide
  modified_base 32: mod_base = OTHER; note = 2'-O-methyl nucleotide
  modified_base 33: mod_base = OTHER; note = 2'-O-methyl nucleotide
  modified_base 34: mod_base = OTHER; note = 2'-O-methyl nucleotide
  modified_base 35: mod_base = OTHER; note = 2'-O-methyl nucleotide
  modified_base 36: mod_base = OTHER; note = 2'-O-methyl nucleotide
  modified_base 37: mod_base = OTHER; note = 2'-O-methyl nucleotide
  modified_base 38: mod_base = OTHER; note = 2'-O-methyl nucleotide
  modified_base 39: mod_base = OTHER; note = 2'-O-methyl nucleotide
  modified_base 40: mod_base = OTHER; note = 2'-O-methyl nucleotide
  modified_base 88: mod_base = OTHER; note = 2'-O-methyl nucleotide, phosphorothioate linkage
  modified_base 89: mod_base = OTHER; note = 2'-O-methyl nucleotide, phosphorothioate linkage
  modified_base 90: mod_base = OTHER; note = 2'-O-methyl nucleotide, phosphorothioate linkage
  modified_base 91: mod_base = OTHER; note = 2'-O-methyl nucleotide
  source 1..91: mol_type = other RNA
tctactgctaccgcgttaacgttttagagctagaaatagcaagttaaaataaggctagtccgttatcacgaaagggcaccgagtcggtgct

SEQ ID NO: 347-400 - skipped (54 entries)

SEQ ID NO: 401 - RNA, 24 nt, synthetic construct
  misc_feature 1..24: note = Synthetic
  source 1..24: mol_type = other RNA
tcaaagtaccctacaggaggacca

SEQ ID NO: 402 - RNA, 24 nt, synthetic construct
  misc_feature 1..24: note = Synthetic
  source 1..24: mol_type = other RNA
agctgccgttctgcccagtccggg

SEQ ID NO: 403 - RNA, 24 nt, synthetic construct
  misc_feature 1..24: note = Synthetic
  source 1..24: mol_type = other RNA
gctctatccacggcgcccgcggct

SEQ ID NO: 404 - RNA, 24 nt, synthetic construct
  misc_feature 1..24: note = Synthetic
  source 1..24: mol_type = other RNA
cactcacccgcccaggtctgggtc

SEQ ID NO: 405 - RNA, 24 nt, synthetic construct
  misc_feature 1..24: note = Synthetic
  source 1..24: mol_type = other RNA
ctctgggaaaggaggggaagatga

SEQ ID NO: 406 - RNA, 24 nt, synthetic construct
  misc_feature 1..24: note = Synthetic
  source 1..24: mol_type = other RNA
tctgggaaaggaggggaagatgag

SEQ ID NO: 407 - RNA, 24 nt, synthetic construct
  misc_feature 1..24: note = Synthetic
  source 1..24: mol_type = other RNA
tcccagagccgtcttcccagtcca

SEQ ID NO: 408 - RNA, 24 nt, synthetic construct
  misc_feature 1..24: note = Synthetic
  source 1..24: mol_type = other RNA
aaaacctgtcagtgattgggttcc

SEQ ID NO: 409 - RNA, 24 nt, synthetic construct
  misc_feature 1..24: note = Synthetic
  source 1..24: mol_type = other RNA
ttaggttcgtatctgtaaaaccaa

SEQ ID NO: 410 - RNA, 24 nt, synthetic construct
  misc_feature 1..24: note = Synthetic
  source 1..24: mol_type = other RNA
gtgtcctaccagcaaggggtcctg

SEQ ID NO: 411 - RNA, 20 nt, synthetic construct
  misc_feature 1..20: note = Synthetic
  source 1..20: mol_type = other RNA
cccccggacggttcaagcaa

SEQ ID NO: 412 - RNA, 20 nt, synthetic construct
  misc_feature 1..20: note = Synthetic
  source 1..20: mol_type = other RNA
acagcgacgccgcgagccag

SEQ ID NO: 413 - RNA, 20 nt, synthetic construct
  misc_feature 1..20: note = Synthetic
  source 1..20: mol_type = other RNA
ctctcagctggtacacggca

SEQ ID NO: 414-420 - skipped (7 entries)

SEQ ID NO: 421 - RNA, 101 nt, synthetic construct
  misc_feature 1..101: note = Synthetic
  source 1..101: mol_type = other RNA
tcaaagtaccctacaggaggaccagttgtagctccctgaaaccgttgctacaataaggccgtcgaaagatgtgccgcaacgctctgccttctggcatcgtt

SEQ ID NO: 422 - RNA, 101 nt, synthetic construct
  misc_feature 1..101: note = Synthetic
  source 1..101: mol_type = other RNA
agctgccgttctgcccagtccggggttgtagctccctgaaaccgttgctacaataaggccgtcgaaagatgtgccgcaacgctctgccttctggcatcgtt

SEQ ID NO: 423 - RNA, 101 nt, synthetic construct
  misc_feature 1..101: note = Synthetic
  source 1..101: mol_type = other RNA
gctctatccacggcgcccgcggctgttgtagctccctgaaaccgttgctacaataaggccgtcgaaagatgtgccgcaacgctctgccttctggcatcgtt

SEQ ID NO: 424 - RNA, 101 nt, synthetic construct
  misc_feature 1..101: note = Synthetic
  source 1..101: mol_type = other RNA
cactcacccgcccaggtctgggtcgttgtagctccctgaaaccgttgctacaataaggccgtcgaaagatgtgccgcaacgctctgccttctggcatcgtt

SEQ ID NO: 425 - RNA, 101 nt, synthetic construct
  misc_feature 1..101: note = Synthetic
  source 1..101: mol_type = other RNA
ctctgggaaaggaggggaagatgagttgtagctccctgaaaccgttgctacaataaggccgtcgaaagatgtgccgcaacgctctgccttctggcatcgtt

SEQ ID NO: 426 - RNA, 101 nt, synthetic construct
  misc_feature 1..101: note = Synthetic
  source 1..101: mol_type = other RNA
tctgggaaaggaggggaagatgaggttgtagctccctgaaaccgttgctacaataaggccgtcgaaagatgtgccgcaacgctctgccttctggcatcgtt

SEQ ID NO: 427 - RNA, 101 nt, synthetic construct
  misc_feature 1..101: note = Synthetic
  source 1..101: mol_type = other RNA
tcccagagccgtcttcccagtccagttgtagctccctgaaaccgttgctacaataaggccgtcgaaagatgtgccgcaacgctctgccttctggcatcgtt

SEQ ID NO: 428 - RNA, 101 nt, synthetic construct
  misc_feature 1..101: note = Synthetic
  source 1..101: mol_type = other RNA
aaaacctgtcagtgattgggttccgttgtagctccctgaaaccgttgctacaataaggccgtcgaaagatgtgccgcaacgctctgccttctggcatcgtt

SEQ ID NO: 429 - RNA, 101 nt, synthetic construct
  misc_feature 1..101: note = Synthetic
  source 1..101: mol_type = other RNA
ttaggttcgtatctgtaaaaccaagttgtagctccctgaaaccgttgctacaataaggccgtcgaaagatgtgccgcaacgctctgccttctggcatcgtt

SEQ ID NO: 430 - RNA, 101 nt, synthetic construct
  misc_feature 1..101: note = Synthetic
  source 1..101: mol_type = other RNA
gtgtcctaccagcaaggggtcctggttgtagctccctgaaaccgttgctacaataaggccgtcgaaagatgtgccgcaacgctctgccttctggcatcgtt

SEQ ID NO: 431 - RNA, 100 nt, synthetic construct
  misc_feature 1..100: note = Synthetic
  source 1..100: mol_type = other RNA
cccccggacggttcaagcaagttttagagctagaaatagcaagttaaaataaggctagtccgttatcaacttgaaaaagtggcaccgagtcggtgctttt

SEQ ID NO: 432 - RNA, 100 nt, synthetic construct
  misc_feature 1..100: note = Synthetic
  source 1..100: mol_type = other RNA
acagcgacgccgcgagccaggttttagagctagaaatagcaagttaaaataaggctagtccgttatcaacttgaaaaagtggcaccgagtcggtgctttt

SEQ ID NO: 433 - RNA, 100 nt, synthetic construct
  misc_feature 1..100: note = Synthetic
  source 1..100: mol_type = other RNA
ctctcagctggtacacggcagttttagagctagaaatagcaagttaaaataaggctagtccgttatcaacttgaaaaagtggcaccgagtcggtgctttt

SEQ ID NO: 434 - RNA, 91 nt, synthetic construct
  misc_feature 1..91: note = Synthetic
  source 1..91: mol_type = other RNA
ctctcagctggtacacggcagttttagagctagaaatagcaagttaaaataaggctagtccgttatcacgaaagggcaccgagtcggtgct

SEQ ID NO: 435-440 - skipped (6 entries)

SEQ ID NO: 441 - RNA, 101 nt, synthetic construct; identical to SEQ ID NO: 421
  misc_feature 1..101: note = Synthetic
  modified_base 1: mod_base = OTHER; note = 2'-O-methyl nucleotide, phosphorothioate linkage
  modified_base 2: mod_base = OTHER; note = 2'-O-methyl nucleotide, phosphorothioate linkage
  modified_base 3: mod_base = OTHER; note = 2'-O-methyl nucleotide, phosphorothioate linkage
  modified_base 4: mod_base = OTHER; note = 2'-O-methyl nucleotide
  modified_base 5: mod_base = OTHER; note = 2'-O-methyl nucleotide
  modified_base 8: mod_base = OTHER; note = 2'-O-methyl nucleotide
  modified_base 9: mod_base = OTHER; note = 2'-O-methyl nucleotide
  modified_base 11: mod_base = OTHER; note = 2'-O-methyl nucleotide
  modified_base 13: mod_base = OTHER; note = 2'-O-methyl nucleotide
  modified_base 18: mod_base = OTHER; note = 2'-O-methyl nucleotide
  modified_base 22: mod_base = OTHER; note = 2'-O-methyl nucleotide
  modified_base 25: mod_base = OTHER; note = 2'-O-methyl nucleotide
  modified_base 29: mod_base = OTHER; note = 2'-O-methyl nucleotide
  modified_base 30: mod_base = OTHER; note = 2'-O-methyl nucleotide
  modified_base 31: mod_base = OTHER; note = 2'-O-methyl nucleotide
  modified_base 32: mod_base = OTHER; note = 2'-O-methyl nucleotide
  modified_base 37: mod_base = OTHER; note = 2'-O-methyl nucleotide
  modified_base 38: mod_base = OTHER; note = 2'-O-methyl nucleotide
  modified_base 39: mod_base = OTHER; note = 2'-O-methyl nucleotide
  modified_base 40: mod_base = OTHER; note = 2'-O-methyl nucleotide
  modified_base 41: mod_base = OTHER; note = 2'-O-methyl nucleotide
  modified_base 42: mod_base = OTHER; note = 2'-O-methyl nucleotide
  modified_base 43: mod_base = OTHER; note = 2'-O-methyl nucleotide
  modified_base 47: mod_base = OTHER; note = 2'-O-methyl nucleotide
  modified_base 48: mod_base = OTHER; note = 2'-O-methyl nucleotide
  modified_base 51: mod_base = OTHER; note = 2'-O-methyl nucleotide
  modified_base 54: mod_base = OTHER; note = phosphorothioate linkage
  modified_base 58: mod_base = OTHER; note = 2'-O-methyl nucleotide
  modified_base 59: mod_base = OTHER; note = 2'-O-methyl nucleotide
  modified_base 61: mod_base = OTHER; note = 2'-O-methyl nucleotide
  modified_base 62: mod_base = OTHER; note = 2'-O-methyl nucleotide
  modified_base 63: mod_base = OTHER; note = 2'-O-methyl nucleotide
  modified_base 64: mod_base = OTHER; note = 2'-O-methyl nucleotide
  modified_base 65: mod_base = OTHER; note = 2'-O-methyl nucleotide
  modified_base 66: mod_base = OTHER; note = 2'-O-methyl nucleotide
  modified_base 67: mod_base = OTHER; note = 2'-O-methyl nucleotide
  modified_base 68: mod_base = OTHER; note = 2'-O-methyl nucleotide
  modified_base 69: mod_base = OTHER; note = 2'-O-methyl nucleotide
  modified_base 70: mod_base = OTHER; note = 2'-O-methyl nucleotide
  modified_base 75: mod_base = OTHER; note = 2'-O-methyl nucleotide
  modified_base 77: mod_base = OTHER; note = 2'-O-methyl nucleotide
  modified_base 80: mod_base = OTHER; note = 2'-O-methyl nucleotide
  modified_base 86: mod_base = OTHER; note = 2'-O-methyl nucleotide
  modified_base 87: mod_base = OTHER; note = 2'-O-methyl nucleotide
  modified_base 89: mod_base = OTHER; note = 2'-O-methyl nucleotide
  modified_base 90: mod_base = OTHER; note = 2'-O-methyl nucleotide
  modified_base 91: mod_base = OTHER; note = 2'-O-methyl nucleotide
  modified_base 92: mod_base = OTHER; note = 2'-O-methyl nucleotide
  modified_base 99: mod_base = OTHER; note = phosphorothioate linkage
  modified_base 100: mod_base = OTHER; note = 2'-O-methyl nucleotide, phosphorothioate linkage
  modified_base 101: mod_base = OTHER; note = 2'-O-methyl nucleotide
  source 1..101: mol_type = other RNA

SEQ ID NO: 442 - RNA, 101 nt, synthetic construct; identical to SEQ ID NO: 421
  misc_feature 1..101: note = Synthetic
  modified_base 1: mod_base = OTHER; note = 2'-O-methyl nucleotide, phosphorothioate linkage
  modified_base 2: mod_base = OTHER; note = 2'-O-methyl nucleotide, phosphorothioate linkage
  modified_base 3: mod_base = OTHER; note = 2'-O-methyl nucleotide, phosphorothioate linkage
  modified_base 4: mod_base = OTHER; note = 2'-O-methyl nucleotide
  modified_base 5: mod_base = OTHER; note = 2'-O-methyl nucleotide
  modified_base 8: mod_base = OTHER; note = 2'-O-methyl nucleotide
  modified_base 9: mod_base = OTHER; note = 2'-O-methyl nucleotide
  modified_base 11: mod_base = OTHER; note = 2'-O-methyl nucleotide
  modified_base 13: mod_base = OTHER; note = 2'-O-methyl nucleotide
  modified_base 18: mod_base = OTHER; note = 2'-O-methyl nucleotide
  modified_base 22: mod_base = OTHER; note = 2'-O-methyl nucleotide
  modified_base 25: mod_base = OTHER; note = 2'-O-methyl nucleotide
  modified_base 29: mod_base = OTHER; note = 2'-O-methyl nucleotide
  modified_base 30: mod_base = OTHER; note = 2'-O-methyl nucleotide
  modified_base 31: mod_base = OTHER; note = 2'-O-methyl nucleotide
  modified_base 32: mod_base = OTHER; note = 2'-O-methyl nucleotide
  modified_base 37: mod_base = OTHER; note = 2'-O-methyl nucleotide
  modified_base 38: mod_base = OTHER; note = 2'-O-methyl nucleotide
  modified_base 39: mod_base = OTHER; note = 2'-O-methyl nucleotide
  modified_base 40: mod_base = OTHER; note = 2'-O-methyl nucleotide
  modified_base 41: mod_base = OTHER; note = 2'-O-methyl nucleotide
  modified_base 42: mod_base = OTHER; note = 2'-O-methyl nucleotide
  modified_base 43: mod_base = OTHER; note = 2'-O-methyl nucleotide
  modified_base 47: mod_base = OTHER; note = 2'-O-methyl nucleotide
  modified_base 48: mod_base = OTHER; note = 2'-O-methyl nucleotide
  modified_base 51: mod_base = OTHER; note = 2'-O-methyl nucleotide
  modified_base 58: mod_base = OTHER; note = 2'-O-methyl nucleotide
  modified_base 59: mod_base = OTHER; note = 2'-O-methyl nucleotide
  modified_base 61: mod_base = OTHER; note = 2'-O-methyl nucleotide
  modified_base 62: mod_base = OTHER; note = 2'-O-methyl nucleotide
  modified_base 63: mod_base = OTHER; note = 2'-O-methyl nucleotide
  modified_base 64: mod_base = OTHER; note = 2'-O-methyl nucleotide
  modified_base 65: mod_base = OTHER; note = 2'-O-methyl nucleotide
  modified_base 66: mod_base = OTHER; note = 2'-O-methyl nucleotide
  modified_base 67: mod_base = OTHER; note = 2'-O-methyl nucleotide
  modified_base 68: mod_base = OTHER; note = 2'-O-methyl nucleotide
  modified_base 69: mod_base = OTHER; note = 2'-O-methyl nucleotide
  modified_base 70: mod_base = OTHER; note = 2'-O-methyl nucleotide
  modified_base 75: mod_base = OTHER; note = 2'-O-methyl nucleotide
  modified_base 77: mod_base = OTHER; note = 2'-O-methyl nucleotide
  modified_base 80: mod_base = OTHER; note = 2'-O-methyl nucleotide
  modified_base 86: mod_base = OTHER; note = 2'-O-methyl nucleotide
  modified_base 87: mod_base = OTHER; note = 2'-O-methyl nucleotide
  modified_base 89: mod_base = OTHER; note = 2'-O-methyl nucleotide
  modified_base 90: mod_base = OTHER; note = 2'-O-methyl nucleotide
  modified_base 91: mod_base = OTHER; note = 2'-O-methyl nucleotide
  modified_base 92: mod_base = OTHER; note = 2'-O-methyl nucleotide
  modified_base 99: mod_base = OTHER; note = phosphorothioate linkage
  modified_base 100: mod_base = OTHER; note = 2'-O-methyl nucleotide, phosphorothioate linkage
  modified_base 101: mod_base = OTHER; note = 2'-O-methyl nucleotide
  source 1..101: mol_type = other RNA

SEQ ID NO: 443 - RNA, 101 nt, synthetic construct; identical to SEQ ID NO: 422
  misc_feature 1..101: note = Synthetic
  modified_base 1: mod_base = OTHER; note = 2'-O-methyl nucleotide, phosphorothioate linkage
  modified_base 2: mod_base = OTHER; note = 2'-O-methyl nucleotide, phosphorothioate linkage
  modified_base 3: mod_base = OTHER; note = 2'-O-methyl nucleotide, phosphorothioate linkage
  modified_base 4: mod_base = OTHER; note = 2'-O-methyl nucleotide
  modified_base 5: mod_base = OTHER; note = 2'-O-methyl nucleotide
  modified_base 8: mod_base = OTHER; note = 2'-O-methyl nucleotide
  modified_base 9: mod_base = OTHER; note = 2'-O-methyl nucleotide
  modified_base 11: mod_base = OTHER; note = 2'-O-methyl nucleotide
  modified_base 13: mod_base = OTHER; note = 2'-O-methyl nucleotide
  modified_base 18: mod_base = OTHER; note = 2'-O-methyl nucleotide
  modified_base 22: mod_base = OTHER; note = 2'-O-methyl nucleotide
  modified_base 25: mod_base = OTHER; note = 2'-O-methyl nucleotide
  modified_base 29: mod_base = OTHER; note = 2'-O-methyl nucleotide
  modified_base 30: mod_base = OTHER; note = 2'-O-methyl nucleotide
  modified_base 31: mod_base = OTHER; note = 2'-O-methyl nucleotide
  modified_base 32: mod_base = OTHER; note = 2'-O-methyl nucleotide
  modified_base 37: mod_base = OTHER; note = 2'-O-methyl nucleotide
  modified_base 38: mod_base = OTHER; note = 2'-O-methyl nucleotide
  modified_base 39: mod_base = OTHER; note = 2'-O-methyl nucleotide
  modified_base 40: mod_base = OTHER; note = 2'-O-methyl nucleotide
  modified_base 41: mod_base = OTHER; note = 2'-O-methyl nucleotide
  modified_base 42: mod_base = OTHER; note = 2'-O-methyl nucleotide
  modified_base 43: mod_base = OTHER; note = 2'-O-methyl nucleotide
  modified_base 47: mod_base = OTHER; note = 2'-O-methyl nucleotide
  modified_base 48: mod_base = OTHER; note = 2'-O-methyl nucleotide
  modified_base 51: mod_base = OTHER; note = 2'-O-methyl nucleotide
  modified_base 54: mod_base = OTHER; note = phosphorothioate linkage
  modified_base 58: mod_base = OTHER; note = 2'-O-methyl nucleotide
  modified_base 59: mod_base = OTHER; note = 2'-O-methyl nucleotide
  modified_base 61: mod_base = OTHER; note = 2'-O-methyl nucleotide
  modified_base 62: mod_base = OTHER; note = 2'-O-methyl nucleotide
  modified_base 63: mod_base = OTHER; note = 2'-O-methyl nucleotide
  modified_base 64: mod_base = OTHER; note = 2'-O-methyl nucleotide
  modified_base 65: mod_base = OTHER; note = 2'-O-methyl nucleotide
  modified_base 66: mod_base = OTHER; note = 2'-O-methyl nucleotide
  modified_base 67: mod_base = OTHER; note = 2'-O-methyl nucleotide
  modified_base 68: mod_base = OTHER; note = 2'-O-methyl nucleotide
  modified_base 69: mod_base = OTHER; note = 2'-O-methyl nucleotide
  modified_base 70: mod_base = OTHER; note = 2'-O-methyl nucleotide
  modified_base 75: mod_base = OTHER; note = 2'-O-methyl nucleotide
  modified_base 77: mod_base = OTHER; note = 2'-O-methyl nucleotide
  modified_base 80: mod_base = OTHER; note = 2'-O-methyl nucleotide
  modified_base 86: mod_base = OTHER; note = 2'-O-methyl nucleotide
  modified_base 87: mod_base = OTHER; note = 2'-O-methyl nucleotide
  modified_base 89: mod_base = OTHER; note = 2'-O-methyl nucleotide
  modified_base 90: mod_base = OTHER; note = 2'-O-methyl nucleotide
  modified_base 91: mod_base = OTHER; note = 2'-O-methyl nucleotide
  modified_base 92: mod_base = OTHER; note = 2'-O-methyl nucleotide
  modified_base 99: mod_base = OTHER; note = phosphorothioate linkage
  modified_base 100: mod_base = OTHER; note = 2'-O-methyl nucleotide, phosphorothioate linkage
  modified_base 101: mod_base = OTHER; note = 2'-O-methyl nucleotide
  source 1..101: mol_type = other RNA

SEQ ID NO: 444 - RNA, 101 nt, synthetic construct; identical to SEQ ID NO: 422
  misc_feature 1..101: note = Synthetic
  modified_base 1: mod_base = OTHER; note = 2'-O-methyl nucleotide, phosphorothioate linkage
  modified_base 2: mod_base = OTHER; note = 2'-O-methyl nucleotide, phosphorothioate linkage
  modified_base 3: mod_base = OTHER; note = 2'-O-methyl nucleotide, phosphorothioate linkage
  modified_base 4: mod_base = OTHER; note = 2'-O-methyl nucleotide
  modified_base 5: mod_base = OTHER; note = 2'-O-methyl nucleotide
  modified_base 8: mod_base = OTHER; note = 2'-O-methyl nucleotide
  modified_base 9: mod_base = OTHER; note = 2'-O-methyl nucleotide
  modified_base 11: mod_base = OTHER; note = 2'-O-methyl nucleotide
  modified_base 13: mod_base = OTHER; note = 2'-O-methyl nucleotide
  modified_base 18: mod_base = OTHER; note = 2'-O-methyl nucleotide
  modified_base 22: mod_base = OTHER; note = 2'-O-methyl nucleotide
  modified_base 25: mod_base = OTHER; note = 2'-O-methyl nucleotide
  modified_base 29: mod_base = OTHER; note = 2'-O-methyl nucleotide
  modified_base 30: mod_base = OTHER; note = 2'-O-methyl nucleotide
  modified_base 31: mod_base = OTHER; note = 2'-O-methyl nucleotide
  modified_base 32: mod_base = OTHER; note = 2'-O-methyl nucleotide
  modified_base 37: mod_base = OTHER; note = 2'-O-methyl nucleotide
  modified_base 38: mod_base = OTHER; note = 2'-O-methyl nucleotide
  modified_base 39: mod_base = OTHER; note = 2'-O-methyl nucleotide
  modified_base 40: mod_base = OTHER; note = 2'-O-methyl nucleotide
  modified_base 41: mod_base = OTHER; note = 2'-O-methyl nucleotide
  modified_base 42: mod_base = OTHER; note = 2'-O-methyl nucleotide
  modified_base 43: mod_base = OTHER; note = 2'-O-methyl nucleotide
  modified_base 47: mod_base = OTHER; note = 2'-O-methyl nucleotide
  modified_base 48: mod_base = OTHER; note = 2'-O-methyl nucleotide
  modified_base 51: mod_base = OTHER; note = 2'-O-methyl nucleotide
  modified_base 58: mod_base = OTHER; note = 2'-O-methyl nucleotide
  modified_base 59: mod_base = OTHER; note = 2'-O-methyl nucleotide
  modified_base 61: mod_base = OTHER; note = 2'-O-methyl nucleotide
  modified_base 62: mod_base = OTHER; note = 2'-O-methyl nucleotide
  modified_base 63: mod_base = OTHER; note = 2'-O-methyl nucleotide
  modified_base 64: mod_base = OTHER; note = 2'-O-methyl nucleotide
  modified_base 65: mod_base = OTHER; note = 2'-O-methyl nucleotide
  modified_base 66: mod_base = OTHER; note = 2'-O-methyl nucleotide
  modified_base 67: mod_base = OTHER; note = 2'-O-methyl nucleotide
  modified_base 68: mod_base = OTHER; note = 2'-O-methyl nucleotide
  modified_base 69: mod_base = OTHER; note = 2'-O-methyl nucleotide
  modified_base 70: mod_base = OTHER; note = 2'-O-methyl nucleotide
  modified_base 75: mod_base = OTHER; note = 2'-O-methyl nucleotide
  modified_base 77: mod_base = OTHER; note = 2'-O-methyl nucleotide
  modified_base 80: mod_base = OTHER; note = 2'-O-methyl nucleotide
  modified_base 86: mod_base = OTHER; note = 2'-O-methyl nucleotide
  modified_base 87: mod_base = OTHER; note = 2'-O-methyl nucleotide
  modified_base 89: mod_base = OTHER; note = 2'-O-methyl nucleotide
  modified_base 90: mod_base = OTHER; note = 2'-O-methyl nucleotide
  modified_base 91: mod_base = OTHER; note = 2'-O-methyl nucleotide
  modified_base 92: mod_base = OTHER; note = 2'-O-methyl nucleotide
  modified_base 99: mod_base = OTHER; note = phosphorothioate linkage
  modified_base 100: mod_base = OTHER; note = 2'-O-methyl nucleotide, phosphorothioate linkage
  modified_base 101: mod_base = OTHER; note = 2'-O-methyl nucleotide
  source 1..101: mol_type = other RNA

SEQ ID NO: 445 - RNA, 101 nt, synthetic construct; identical to SEQ ID NO: 423
  misc_feature 1..101: note = Synthetic
  modified_base 1: mod_base = OTHER; note = 2'-O-methyl nucleotide, phosphorothioate linkage
  modified_base 2: mod_base = OTHER; note = 2'-O-methyl nucleotide, phosphorothioate linkage
  modified_base 3: mod_base = OTHER; note = 2'-O-methyl nucleotide, phosphorothioate linkage
  modified_base 4: mod_base = OTHER; note = 2'-O-methyl nucleotide
  modified_base 5: mod_base = OTHER; note = 2'-O-methyl nucleotide
  modified_base 8: mod_base = OTHER; note = 2'-O-methyl nucleotide
  modified_base 9: mod_base = OTHER; note = 2'-O-methyl nucleotide
  modified_base 11: mod_base = OTHER; note = 2'-O-methyl nucleotide
  modified_base 13: mod_base = OTHER; note = 2'-O-methyl nucleotide
  modified_base 18: mod_base = OTHER; note = 2'-O-methyl nucleotide
  modified_base 22: mod_base = OTHER; note = 2'-O-methyl nucleotide
  modified_base 25: mod_base = OTHER; note = 2'-O-methyl nucleotide
  modified_base 29: mod_base = OTHER; note = 2'-O-methyl nucleotide
  modified_base 30: mod_base = OTHER; note = 2'-O-methyl nucleotide
  modified_base 31: mod_base = OTHER; note = 2'-O-methyl nucleotide
  modified_base 32: mod_base = OTHER; note = 2'-O-methyl nucleotide
  modified_base 37: mod_base = OTHER; note = 2'-O-methyl nucleotide
  modified_base 38: mod_base = OTHER; note = 2'-O-methyl nucleotide
  modified_base 39: mod_base = OTHER; note = 2'-O-methyl nucleotide
  modified_base 40: mod_base = OTHER; note = 2'-O-methyl nucleotide
  modified_base 41: mod_base = OTHER; note = 2'-O-methyl nucleotide
  modified_base 42: mod_base = OTHER; note = 2'-O-methyl nucleotide
  modified_base 43: mod_base = OTHER; note = 2'-O-methyl nucleotide
  modified_base 47: mod_base = OTHER; note = 2'-O-methyl nucleotide
  modified_base 48: mod_base = OTHER; note = 2'-O-methyl nucleotide
  modified_base 51: mod_base = OTHER; note = 2'-O-methyl nucleotide
  modified_base 54: mod_base = OTHER; note = phosphorothioate linkage
  modified_base 58: mod_base = OTHER; note = 2'-O-methyl nucleotide
  modified_base 59: mod_base = OTHER; note = 2'-O-methyl nucleotide
  modified_base 61: mod_base = OTHER; note = 2'-O-methyl nucleotide
  modified_base 62: mod_base = OTHER; note = 2'-O-methyl nucleotide
  modified_base 63: mod_base = OTHER; note = 2'-O-methyl nucleotide
  modified_base 64: mod_base = OTHER; note = 2'-O-methyl nucleotide
  modified_base 65: mod_base = OTHER; note = 2'-O-methyl nucleotide
  modified_base 66: mod_base = OTHER; note = 2'-O-methyl nucleotide
  modified_base 67: mod_base = OTHER; note = 2'-O-methyl nucleotide
  modified_base 68: mod_base = OTHER; note = 2'-O-methyl nucleotide
  modified_base 69: mod_base = OTHER; note = 2'-O-methyl nucleotide
  modified_base 70: mod_base = OTHER; note = 2'-O-methyl nucleotide
  modified_base 75: mod_base = OTHER; note = 2'-O-methyl nucleotide
  modified_base 77: mod_base = OTHER; note = 2'-O-methyl nucleotide
  modified_base 80: mod_base = OTHER; note = 2'-O-methyl nucleotide
  modified_base 86: mod_base = OTHER; note = 2'-O-methyl nucleotide
  modified_base 87: mod_base = OTHER; note = 2'-O-methyl nucleotide
  modified_base 89: mod_base = OTHER; note = 2'-O-methyl nucleotide
  modified_base 90: mod_base = OTHER; note = 2'-O-methyl nucleotide
  modified_base 91: mod_base = OTHER; note = 2'-O-methyl nucleotide
  modified_base 92: mod_base = OTHER; note = 2'-O-methyl nucleotide
  modified_base 99: mod_base = OTHER; note = phosphorothioate linkage
  modified_base 100: mod_base = OTHER; note = 2'-O-methyl nucleotide, phosphorothioate linkage
  modified_base 101: mod_base = OTHER; note = 2'-O-methyl nucleotide
  source 1..101: mol_type = other RNA

SEQ ID NO: 446 - RNA, 101 nt, synthetic construct; identical to SEQ ID NO: 423
  misc_feature 1..101: note = Synthetic
  modified_base 1: mod_base = OTHER; note = 2'-O-methyl nucleotide, phosphorothioate linkage
  modified_base 2: mod_base = OTHER; note = 2'-O-methyl nucleotide, phosphorothioate linkage
  modified_base 3: mod_base = OTHER; note = 2'-O-methyl nucleotide, phosphorothioate linkage
  modified_base 4: mod_base = OTHER; note = 2'-O-methyl nucleotide
  modified_base 5: mod_base = OTHER; note = 2'-O-methyl nucleotide
  modified_base 8: mod_base = OTHER; note = 2'-O-methyl nucleotide
  modified_base 9: mod_base = OTHER; note = 2'-O-methyl nucleotide
  modified_base 11: mod_base = OTHER; note = 2'-O-methyl nucleotide
  modified_base 13: mod_base = OTHER; note = 2'-O-methyl nucleotide
  modified_base 18: mod_base = OTHER; note = 2'-O-methyl nucleotide
  modified_base 22: mod_base = OTHER; note = 2'-O-methyl nucleotide
  modified_base 25: mod_base = OTHER; note = 2'-O-methyl nucleotide
  modified_base 29: mod_base = OTHER; note = 2'-O-methyl nucleotide
  modified_base 30: mod_base = OTHER; note = 2'-O-methyl nucleotide
  modified_base 31: mod_base = OTHER; note = 2'-O-methyl nucleotide
  modified_base 32: mod_base = OTHER; note = 2'-O-methyl nucleotide
  modified_base 37: mod_base = OTHER; note = 2'-O-methyl nucleotide
  modified_base 38: mod_base = OTHER; note = 2'-O-methyl nucleotide
  modified_base 39: mod_base = OTHER; note = 2'-O-methyl nucleotide
  modified_base 40: mod_base = OTHER; note = 2'-O-methyl nucleotide
  modified_base 41: mod_base = OTHER; note = 2'-O-methyl nucleotide
  modified_base 42: mod_base = OTHER; note = 2'-O-methyl nucleotide
  modified_base 43: mod_base = OTHER; note = 2'-O-methyl nucleotide
  modified_base 47: mod_base = OTHER; note = 2'-O-methyl nucleotide
  modified_base 48: mod_base = OTHER; note = 2'-O-methyl nucleotide
  modified_base 51: mod_base = OTHER; note = 2'-O-methyl nucleotide
  modified_base 58: mod_base = OTHER; note = 2'-O-methyl nucleotide
  modified_base 59: mod_base = OTHER; note = 2'-O-methyl nucleotide
  modified_base 61: mod_base = OTHER; note = 2'-O-methyl nucleotide
  modified_base 62: mod_base = OTHER; note = 2'-O-methyl nucleotide
  modified_base 63: mod_base = OTHER; note = 2'-O-methyl nucleotide
  modified_base 64: mod_base = OTHER; note = 2'-O-methyl nucleotide
  modified_base 65: mod_base = OTHER; note = 2'-O-methyl nucleotide
  modified_base 66: mod_base = OTHER; note = 2'-O-methyl nucleotide
  modified_base 67: mod_base = OTHER; note = 2'-O-methyl nucleotide
  modified_base 68: mod_base = OTHER; note = 2'-O-methyl nucleotide
  modified_base 69: mod_base = OTHER; note = 2'-O-methyl nucleotide
  modified_base 70: mod_base = OTHER; note = 2'-O-methyl nucleotide
  modified_base 75: mod_base = OTHER; note = 2'-O-methyl nucleotide
  modified_base 77: mod_base = OTHER; note = 2'-O-methyl nucleotide
  modified_base 80: mod_base = OTHER; note = 2'-O-methyl nucleotide
  modified_base 86: mod_base = OTHER; note = 2'-O-methyl nucleotide
  modified_base 87: mod_base = OTHER; note = 2'-O-methyl nucleotide
  modified_base 89: mod_base = OTHER; note = 2'-O-methyl nucleotide
  modified_base 90: mod_base = OTHER; note = 2'-O-methyl nucleotide
  modified_base 91: mod_base = OTHER; note = 2'-O-methyl nucleotide
  modified_base 92: mod_base = OTHER; note = 2'-O-methyl nucleotide
  modified_base 99: mod_base = OTHER; note = phosphorothioate linkage
  modified_base 100: mod_base = OTHER; note = 2'-O-methyl nucleotide, phosphorothioate linkage
  modified_base 101: mod_base = OTHER; note = 2'-O-methyl nucleotide
  source 1..101: mol_type = other RNA

SEQ ID NO: 447 - RNA, 101 nt, synthetic construct; identical to SEQ ID NO: 424
  misc_feature 1..101: note = Synthetic
  modified_base 1: mod_base = OTHER; note = 2'-O-methyl nucleotide, phosphorothioate linkage
  modified_base 2: mod_base = OTHER; note = 2'-O-methyl nucleotide, phosphorothioate linkage
  modified_base 3: mod_base = OTHER; note = 2'-O-methyl nucleotide, phosphorothioate linkage
  modified_base 4: mod_base = OTHER; note = 2'-O-methyl nucleotide
  modified_base 5: mod_base = OTHER; note = 2'-O-methyl nucleotide
  modified_base 8: mod_base = OTHER; note = 2'-O-methyl nucleotide
  modified_base 9: mod_base = OTHER; note = 2'-O-methyl nucleotide
  modified_base 11: mod_base = OTHER; note = 2'-O-methyl nucleotide
  modified_base 13: mod_base = OTHER; note = 2'-O-methyl nucleotide
  modified_base 18: mod_base = OTHER; note = 2'-O-methyl nucleotide
  modified_base 22: mod_base = OTHER; note = 2'-O-methyl nucleotide
  modified_base 25: mod_base = OTHER; note = 2'-O-methyl nucleotide
  modified_base 29: mod_base = OTHER; note = 2'-O-methyl nucleotide
  modified_base 30: mod_base = OTHER; note = 2'-O-methyl nucleotide
  modified_base 31: mod_base = OTHER; note = 2'-O-methyl nucleotide
  modified_base 32: mod_base = OTHER; note = 2'-O-methyl nucleotide
  modified_base 37: mod_base = OTHER; note = 2'-O-methyl nucleotide
  modified_base 38: mod_base = OTHER; note = 2'-O-methyl nucleotide
  modified_base 39: mod_base = OTHER; note = 2'-O-methyl nucleotide
  modified_base 40: mod_base = OTHER; note = 2'-O-methyl nucleotide
  modified_base 41: mod_base = OTHER; note = 2'-O-methyl nucleotide
  modified_base 42: mod_base = OTHER; note = 2'-O-methyl nucleotide
  modified_base 43: mod_base = OTHER; note = 2'-O-methyl nucleotide
  modified_base 47: mod_base = OTHER; note = 2'-O-methyl nucleotide
  modified_base 48: mod_base = OTHER; note = 2'-O-methyl nucleotide
  modified_base 51: mod_base = OTHER; note = 2'-O-methyl nucleotide
  modified_base 54: mod_base = OTHER; note = phosphorothioate linkage
  modified_base 58: mod_base = OTHER; note = 2'-O-methyl nucleotide
  modified_base 59: mod_base = OTHER; note = 2'-O-methyl nucleotide
  modified_base 61: mod_base = OTHER; note = 2'-O-methyl nucleotide
  modified_base 62: mod_base = OTHER; note = 2'-O-methyl nucleotide
  modified_base 63: mod_base = OTHER; note = 2'-O-methyl nucleotide
  modified_base 64: mod_base = OTHER; note = 2'-O-methyl nucleotide
  modified_base 65: mod_base = OTHER; note = 2'-O-methyl nucleotide
  modified_base 66: mod_base = OTHER; note = 2'-O-methyl nucleotide
  modified_base 67: mod_base = OTHER; note = 2'-O-methyl nucleotide
  modified_base 68: mod_base = OTHER; note = 2'-O-methyl nucleotide
  modified_base 69: mod_base = OTHER; note = 2'-O-methyl nucleotide
  modified_base 70: mod_base = OTHER; note = 2'-O-methyl nucleotide
  modified_base 75: mod_base = OTHER; note = 2'-O-methyl nucleotide
  modified_base 77: mod_base = OTHER; note = 2'-O-methyl nucleotide
  modified_base 80: mod_base = OTHER; note = 2'-O-methyl nucleotide
  modified_base 86: mod_base = OTHER; note = 2'-O-methyl nucleotide
  modified_base 87: mod_base = OTHER; note = 2'-O-methyl nucleotide
  modified_base 89: mod_base = OTHER; note = 2'-O-methyl nucleotide
  modified_base 90: mod_base = OTHER; note = 2'-O-methyl nucleotide
  modified_base 91: mod_base = OTHER; note = 2'-O-methyl nucleotide
  modified_base 92: mod_base = OTHER; note = 2'-O-methyl nucleotide
  modified_base 99: mod_base = OTHER; note = phosphorothioate linkage
  modified_base 100: mod_base = OTHER; note = 2'-O-methyl nucleotide, phosphorothioate linkage
  modified_base 101: mod_base = OTHER; note = 2'-O-methyl nucleotide
  source 1..101: mol_type = other RNA

SEQ ID NO: 448 - RNA, 101 nt, synthetic construct; identical to SEQ ID NO: 424
  misc_feature 1..101: note = Synthetic
  modified_base 1: mod_base = OTHER; note = 2'-O-methyl nucleotide, phosphorothioate linkage
  modified_base 2: mod_base = OTHER; note = 2'-O-methyl nucleotide, phosphorothioate linkage
  modified_base 3: mod_base = OTHER; note = 2'-O-methyl nucleotide, phosphorothioate linkage
  modified_base 4: mod_base = OTHER; note = 2'-O-methyl nucleotide
  modified_base 5: mod_base = OTHER; note = 2'-O-methyl nucleotide
  modified_base 8: mod_base = OTHER; note = 2'-O-methyl nucleotide
  modified_base 9: mod_base = OTHER; note = 2'-O-methyl nucleotide
  modified_base 11: mod_base = OTHER; note = 2'-O-methyl nucleotide
  modified_base 13: mod_base = OTHER; note = 2'-O-methyl nucleotide
  modified_base 18: mod_base = OTHER; note = 2'-O-methyl nucleotide
  modified_base 22: mod_base = OTHER; note = 2'-O-methyl nucleotide
  modified_base 25: mod_base = OTHER; note = 2'-O-methyl nucleotide
  modified_base 29: mod_base = OTHER; note = 2'-O-methyl nucleotide
  modified_base 30: mod_base = OTHER; note = 2'-O-methyl nucleotide
  modified_base 31: mod_base = OTHER; note = 2'-O-methyl nucleotide
  modified_base 32: mod_base = OTHER; note = 2'-O-methyl nucleotide
  modified_base 37: mod_base = OTHER; note = 2'-O-methyl nucleotide
  modified_base 38: mod_base = OTHER; note = 2'-O-methyl nucleotide
  modified_base 39: mod_base = OTHER; note = 2'-O-methyl nucleotide
  modified_base 40: mod_base = OTHER; note = 2'-O-methyl nucleotide
  modified_base 41: mod_base = OTHER; note = 2'-O-methyl nucleotide
  modified_base 42: mod_base = OTHER; note = 2'-O-methyl nucleotide
  modified_base 43: mod_base = OTHER; note = 2'-O-methyl nucleotide
  modified_base 47: mod_base = OTHER; note = 2'-O-methyl nucleotide
  modified_base 48: mod_base = OTHER; note = 2'-O-methyl nucleotide
  modified_base 51: mod_base = OTHER; note = 2'-O-methyl nucleotide
  modified_base 58: mod_base = OTHER; note = 2'-O-methyl nucleotide
  modified_base 59: mod_base = OTHER; note = 2'-O-methyl nucleotide
  modified_base 61: mod_base = OTHER; note = 2'-O-methyl nucleotide
  modified_base 62: mod_base = OTHER; note = 2'-O-methyl nucleotide
  modified_base 63: mod_base = OTHER; note = 2'-O-methyl nucleotide
  modified_base 64: mod_base = OTHER; note = 2'-O-methyl nucleotide
  modified_base 65: mod_base = OTHER; note = 2'-O-methyl nucleotide
  modified_base 66: mod_base = OTHER; note = 2'-O-methyl nucleotide
  modified_base 67: mod_base = OTHER; note = 2'-O-methyl nucleotide
  modified_base 68: mod_base = OTHER; note = 2'-O-methyl nucleotide
  modified_base 69: mod_base = OTHER; note = 2'-O-methyl nucleotide
  modified_base 70: mod_base = OTHER; note = 2'-O-methyl nucleotide
  modified_base 75: mod_base = OTHER; note = 2'-O-methyl nucleotide
  modified_base 77: mod_base = OTHER; note = 2'-O-methyl nucleotide
  modified_base 80: mod_base = OTHER; note = 2'-O-methyl nucleotide
  modified_base 86: mod_base = OTHER; note = 2'-O-methyl nucleotide
  modified_base 87: mod_base = OTHER; note = 2'-O-methyl nucleotide
  modified_base 89: mod_base = OTHER; note = 2'-O-methyl nucleotide
  modified_base 90: mod_base = OTHER; note = 2'-O-methyl nucleotide
  modified_base 91: mod_base = OTHER; note = 2'-O-methyl nucleotide
  modified_base 92: mod_base = OTHER; note = 2'-O-methyl nucleotide
  modified_base 99: mod_base = OTHER; note = phosphorothioate linkage
  modified_base 100: mod_base = OTHER; note = 2'-O-methyl nucleotide, phosphorothioate linkage
  modified_base 101: mod_base = OTHER; note = 2'-O-methyl nucleotide
  source 1..101: mol_type = other RNA

SEQ ID NO: 449 - RNA, 101 nt, synthetic construct; identical to SEQ ID NO: 425
  misc_feature 1..101: note = Synthetic
  modified_base 1: mod_base = OTHER; note = 2'-O-methyl nucleotide, phosphorothioate linkage
  modified_base 2: mod_base = OTHER; note = 2'-O-methyl nucleotide, phosphorothioate linkage
  modified_base 3: mod_base = OTHER; note = 2'-O-methyl nucleotide, phosphorothioate linkage
  modified_base 4: mod_base = OTHER; note = 2'-O-methyl nucleotide
  modified_base 5: mod_base = OTHER; note = 2'-O-methyl nucleotide
  modified_base 8: mod_base = OTHER; note = 2'-O-methyl nucleotide
  modified_base 9: mod_base = OTHER; note = 2'-O-methyl nucleotide
  modified_base 11: mod_base = OTHER; note = 2'-O-methyl nucleotide
  modified_base 13: mod_base = OTHER; note = 2'-O-methyl nucleotide
  modified_base 18: mod_base = OTHER; note = 2'-O-methyl nucleotide
  modified_base 22: mod_base = OTHER; note = 2'-O-methyl nucleotide
  modified_base 25: mod_base = OTHER; note = 2'-O-methyl nucleotide
  modified_base 29: mod_base = OTHER; note = 2'-O-methyl nucleotide
  modified_base 30: mod_base = OTHER; note = 2'-O-methyl nucleotide
  modified_base 31: mod_base = OTHER; note = 2'-O-methyl nucleotide
  modified_base 32: mod_base = OTHER; note = 2'-O-methyl nucleotide
  modified_base 37: mod_base = OTHER; note = 2'-O-methyl nucleotide
  modified_base 38: mod_base = OTHER; note = 2'-O-methyl nucleotide
  modified_base 39: mod_base = OTHER; note = 2'-O-methyl nucleotide
  modified_base 40: mod_base = OTHER; note = 2'-O-methyl nucleotide
  modified_base 41: mod_base = OTHER; note = 2'-O-methyl nucleotide
  modified_base 42: mod_base = OTHER; note = 2'-O-methyl nucleotide
  modified_base 43: mod_base = OTHER; note = 2'-O-methyl nucleotide
  modified_base 47: mod_base = OTHER; note = 2'-O-methyl nucleotide
  modified_base 48: mod_base = OTHER; note = 2'-O-methyl nucleotide
  modified_base 51: mod_base = OTHER; note = 2'-O-methyl nucleotide
  modified_base 54: mod_base = OTHER; note = phosphorothioate linkage
  modified_base 58: mod_base = OTHER; note = 2'-O-methyl nucleotide
  modified_base 59: mod_base = OTHER; note = 2'-O-methyl nucleotide
  modified_base 61: mod_base = OTHER; note = 2'-O-methyl nucleotide
  modified_base 62: mod_base = OTHER; note = 2'-O-methyl nucleotide
  modified_base 63: mod_base = OTHER; note = 2'-O-methyl nucleotide
  modified_base 64: mod_base = OTHER; note = 2'-O-methyl nucleotide
  modified_base 65: mod_base = OTHER; note = 2'-O-methyl nucleotide
  modified_base 66: mod_base = OTHER; note = 2'-O-methyl nucleotide
  modified_base 67: mod_base = OTHER; note = 2'-O-methyl nucleotide
  modified_base 68: mod_base = OTHER; note = 2'-O-methyl nucleotide
  modified_base 69: mod_base = OTHER; note = 2'-O-methyl nucleotide
  modified_base 70: mod_base = OTHER; note = 2'-O-methyl nucleotide
  modified_base 75: mod_base = OTHER; note = 2'-O-methyl nucleotide
  modified_base 77: mod_base = OTHER; note = 2'-O-methyl nucleotide
  modified_base 80: mod_base = OTHER; note = 2'-O-methyl nucleotide
  modified_base 86: mod_base = OTHER; note = 2'-O-methyl nucleotide
  modified_base 87: mod_base = OTHER; note = 2'-O-methyl nucleotide
  modified_base 89: mod_base = OTHER; note = 2'-O-methyl nucleotide
  modified_base 90: mod_base = OTHER; note = 2'-O-methyl nucleotide
  modified_base 91: mod_base = OTHER; note = 2'-O-methyl nucleotide
  modified_base 92: mod_base = OTHER; note = 2'-O-methyl nucleotide
  modified_base 99: mod_base = OTHER; note = phosphorothioate linkage
  modified_base 100: mod_base = OTHER; note = 2'-O-methyl nucleotide, phosphorothioate linkage
  modified_base 101: mod_base = OTHER; note = 2'-O-methyl nucleotide
  source 1..101: mol_type = other RNA

SEQ ID NO: 450 - RNA, 101 nt, synthetic construct; identical to SEQ ID NO: 425
  misc_feature 1..101: note = Synthetic
  modified_base 1: mod_base = OTHER; note = 2'-O-methyl nucleotide, phosphorothioate linkage
  modified_base 2: mod_base = OTHER; note = 2'-O-methyl nucleotide, phosphorothioate linkage
  modified_base 3: mod_base = OTHER; note = 2'-O-methyl nucleotide, phosphorothioate linkage
  modified_base 4: mod_base = OTHER; note = 2'-O-methyl nucleotide
  modified_base 5: mod_base = OTHER; note = 2'-O-methyl nucleotide
  modified_base 8: mod_base = OTHER; note = 2'-O-methyl nucleotide
  modified_base 9: mod_base = OTHER; note = 2'-O-methyl nucleotide
  modified_base 11: mod_base = OTHER; note = 2'-O-methyl nucleotide
  modified_base 13: mod_base = OTHER; note = 2'-O-methyl nucleotide
  modified_base 18: mod_base = OTHER; note = 2'-O-methyl nucleotide
  modified_base 22: mod_base = OTHER; note = 2'-O-methyl nucleotide
  modified_base 25: mod_base = OTHER; note = 2'-O-methyl nucleotide
  modified_base 29: mod_base = OTHER; note = 2'-O-methyl nucleotide
  modified_base 30: mod_base = OTHER; note = 2'-O-methyl nucleotide
  modified_base 31: mod_base = OTHER; note = 2'-O-methyl nucleotide
  modified_base 32: mod_base = OTHER; note = 2'-O-methyl nucleotide
  modified_base 37: mod_base = OTHER; note = 2'-O-methyl nucleotide
  modified_base 38: mod_base = OTHER; note = 2'-O-methyl nucleotide
  modified_base 39: mod_base = OTHER; note = 2'-O-methyl nucleotide
  modified_base 40: mod_base = OTHER; note = 2'-O-methyl nucleotide
  modified_base 41: mod_base = OTHER; note = 2'-O-methyl nucleotide
  modified_base 42: mod_base = OTHER; note = 2'-O-methyl nucleotide
  modified_base 43: mod_base = OTHER; note = 2'-O-methyl nucleotide
  modified_base 47: mod_base = OTHER; note = 2'-O-methyl nucleotide
  modified_base 48: mod_base = OTHER; note = 2'-O-methyl nucleotide
  modified_base 51: mod_base = OTHER; note = 2'-O-methyl nucleotide
  modified_base 58: mod_base = OTHER; note = 2'-O-methyl nucleotide
  modified_base 59: mod_base = OTHER; note = 2'-O-methyl nucleotide
  modified_base 61: mod_base = OTHER; note = 2'-O-methyl nucleotide
  modified_base 62: mod_base = OTHER; note = 2'-O-methyl nucleotide
  modified_base 63: mod_base = OTHER; note = 2'-O-methyl nucleotide
  modified_base 64: mod_base = OTHER; note = 2'-O-methyl nucleotide
  modified_base 65: mod_base = OTHER; note = 2'-O-methyl nucleotide
  modified_base 66: mod_base = OTHER; note = 2'-O-methyl nucleotide
  modified_base 67: mod_base = OTHER; note = 2'-O-methyl nucleotide
  modified_base 68: mod_base = OTHER; note = 2'-O-methyl nucleotide
  modified_base 69: mod_base = OTHER; note = 2'-O-methyl nucleotide
  modified_base 70: mod_base = OTHER; note = 2'-O-methyl nucleotide
  modified_base 75: mod_base = OTHER; note = 2'-O-methyl nucleotide
  modified_base 77: mod_base = OTHER; note = 2'-O-methyl nucleotide
  modified_base 80: mod_base = OTHER; note = 2'-O-methyl nucleotide
  modified_base 86: mod_base = OTHER; note = 2'-O-methyl nucleotide
  modified_base 87: mod_base = OTHER; note = 2'-O-methyl nucleotide
  modified_base 89: mod_base = OTHER; note = 2'-O-methyl nucleotide
  modified_base 90: mod_base = OTHER; note = 2'-O-methyl nucleotide
  modified_base 91: mod_base = OTHER; note = 2'-O-methyl nucleotide
  modified_base 92: mod_base = OTHER; note = 2'-O-methyl nucleotide
  modified_base 99: mod_base = OTHER; note = phosphorothioate linkage
  modified_base 100: mod_base = OTHER; note = 2'-O-methyl nucleotide, phosphorothioate linkage
  modified_base 101: mod_base = OTHER; note = 2'-O-methyl nucleotide
  source 1..101: mol_type = other RNA

SEQ ID NO: 451 - RNA, 101 nt, synthetic construct; identical to SEQ ID NO: 426
  misc_feature 1..101: note = Synthetic
  modified_base 1: mod_base = OTHER; note = 2'-O-methyl nucleotide, phosphorothioate linkage
  modified_base 2: mod_base = OTHER; note = 2'-O-methyl nucleotide, phosphorothioate linkage
  modified_base 3: mod_base = OTHER; note = 2'-O-methyl nucleotide, phosphorothioate linkage
  modified_base 4: mod_base = OTHER; note = 2'-O-methyl nucleotide
  modified_base 5: mod_base = OTHER; note = 2'-O-methyl nucleotide
  modified_base 8: mod_base = OTHER; note = 2'-O-methyl nucleotide
  modified_base 9: mod_base = OTHER; note = 2'-O-methyl nucleotide
  modified_base 11: mod_base = OTHER; note = 2'-O-methyl nucleotide
  modified_base 13: mod_base = OTHER; note = 2'-O-methyl nucleotide
  modified_base 18: mod_base = OTHER; note = 2'-O-methyl nucleotide
  modified_base 22: mod_base = OTHER; note = 2'-O-methyl nucleotide
  modified_base 25: mod_base = OTHER; note = 2'-O-methyl nucleotide
  modified_base 29: mod_base = OTHER; note = 2'-O-methyl nucleotide
  modified_base 30: mod_base = OTHER; note = 2'-O-methyl nucleotide
  modified_base 31: mod_base = OTHER; note = 2'-O-methyl nucleotide
  modified_base 32: mod_base = OTHER; note = 2'-O-methyl nucleotide
  modified_base 37: mod_base = OTHER; note = 2'-O-methyl nucleotide
  modified_base 38: mod_base = OTHER; note = 2'-O-methyl nucleotide
  modified_base 39: mod_base = OTHER; note = 2'-O-methyl nucleotide
  modified_base 40: mod_base = OTHER; note = 2'-O-methyl nucleotide
  modified_base 41: mod_base = OTHER; note = 2'-O-methyl nucleotide
  modified_base 42: mod_base = OTHER; note = 2'-O-methyl nucleotide
  modified_base 43: mod_base = OTHER; note = 2'-O-methyl nucleotide
  modified_base 47: mod_base = OTHER; note = 2'-O-methyl nucleotide
  modified_base 48: mod_base = OTHER; note = 2'-O-methyl nucleotide
  modified_base 51: mod_base = OTHER; note = 2'-O-methyl nucleotide
  modified_base 54: mod_base = OTHER; note = phosphorothioate linkage
  modified_base 58: mod_base = OTHER; note = 2'-O-methyl nucleotide
  modified_base 59: mod_base = OTHER; note = 2'-O-methyl nucleotide
  modified_base 61: mod_base = OTHER; note = 2'-O-methyl nucleotide
  modified_base 62: mod_base = OTHER; note = 2'-O-methyl nucleotide
  modified_base 63: mod_base = OTHER; note = 2'-O-methyl nucleotide
  modified_base 64: mod_base = OTHER; note = 2'-O-methyl nucleotide
  modified_base 65: mod_base = OTHER; note = 2'-O-methyl nucleotide
  modified_base 66: mod_base = OTHER; note = 2'-O-methyl nucleotide
  modified_base 67: mod_base = OTHER; note = 2'-O-methyl nucleotide
  modified_base 68: mod_base = OTHER; note = 2'-O-methyl nucleotide
  modified_base 69: mod_base = OTHER; note = 2'-O-methyl nucleotide
  modified_base 70: mod_base = OTHER; note = 2'-O-methyl nucleotide
  modified_base 75: mod_base = OTHER; note = 2'-O-methyl nucleotide
  modified_base 77: mod_base = OTHER; note = 2'-O-methyl nucleotide
  modified_base 80: mod_base = OTHER; note = 2'-O-methyl nucleotide
  modified_base 86: mod_base = OTHER; note = 2'-O-methyl nucleotide
  modified_base 87: mod_base = OTHER; note = 2'-O-methyl nucleotide
  modified_base 89: mod_base = OTHER; note = 2'-O-methyl nucleotide
  modified_base 90: mod_base = OTHER; note = 2'-O-methyl nucleotide
  modified_base 91: mod_base = OTHER; note = 2'-O-methyl nucleotide
  modified_base 92: mod_base = OTHER; note = 2'-O-methyl nucleotide
  modified_base 99: mod_base = OTHER; note = phosphorothioate linkage
  modified_base 100: mod_base = OTHER; note = 2'-O-methyl nucleotide, phosphorothioate linkage
  modified_base 101: mod_base = OTHER; note = 2'-O-methyl nucleotide
  source 1..101: mol_type = other RNA

SEQ ID NO: 452 - RNA, 101 nt, synthetic construct; identical to SEQ ID NO: 426
  misc_feature 1..101: note = Synthetic
  modified_base 1: mod_base = OTHER; note = 2'-O-methyl nucleotide, phosphorothioate linkage
  modified_base 2: mod_base = OTHER; note = 2'-O-methyl nucleotide, phosphorothioate linkage
  modified_base 3: mod_base = OTHER; note = 2'-O-methyl nucleotide, phosphorothioate linkage
  modified_base 4: mod_base = OTHER; note = 2'-O-methyl nucleotide
  modified_base 5: mod_base = OTHER; note = 2'-O-methyl nucleotide
  modified_base 8: mod_base = OTHER; note = 2'-O-methyl nucleotide
  modified_base 9: mod_base = OTHER; note = 2'-O-methyl nucleotide
  modified_base 11: mod_base = OTHER; note = 2'-O-methyl nucleotide
  modified_base 13: mod_base = OTHER; note = 2'-O-methyl nucleotide
  modified_base 18: mod_base = OTHER; note = 2'-O-methyl nucleotide
  modified_base 22: mod_base = OTHER; note = 2'-O-methyl nucleotide
  modified_base 25: mod_base = OTHER; note = 2'-O-methyl nucleotide
  modified_base 29: mod_base = OTHER; note = 2'-O-methyl nucleotide
  modified_base 30: mod_base = OTHER; note = 2'-O-methyl nucleotide
  modified_base 31: mod_base = OTHER; note = 2'-O-methyl nucleotide
  modified_base 32: mod_base = OTHER; note = 2'-O-methyl nucleotide
  modified_base 37: mod_base = OTHER; note = 2'-O-methyl nucleotide
  modified_base 38: mod_base = OTHER; note = 2'-O-methyl nucleotide
  modified_base 39: mod_base = OTHER; note = 2'-O-methyl nucleotide
  modified_base 40: mod_base = OTHER; note = 2'-O-methyl nucleotide
  modified_base 41: mod_base = OTHER; note = 2'-O-methyl nucleotide
  modified_base 42: mod_base = OTHER; note = 2'-O-methyl nucleotide
  modified_base 43: mod_base = OTHER; note = 2'-O-methyl nucleotide
  modified_base 47: mod_base = OTHER; note = 2'-O-methyl nucleotide
  modified_base 48: mod_base = OTHER; note = 2'-O-methyl nucleotide
  modified_base 51: mod_base = OTHER; note = 2'-O-methyl nucleotide
  modified_base 58: mod_base = OTHER; note = 2'-O-methyl nucleotide
  modified_base 59: mod_base = OTHER; note = 2'-O-methyl nucleotide
  modified_base 61: mod_base = OTHER; note = 2'-O-methyl nucleotide
  modified_base 62: mod_base = OTHER; note = 2'-O-methyl nucleotide
  modified_base 63: mod_base = OTHER; note = 2'-O-methyl nucleotide
  modified_base 64: mod_base = OTHER; note = 2'-O-methyl nucleotide
  modified_base 65: mod_base = OTHER; note = 2'-O-methyl nucleotide
  modified_base 66: mod_base = OTHER; note = 2'-O-methyl nucleotide
  modified_base 67: mod_base = OTHER; note = 2'-O-methyl nucleotide
  modified_base 68: mod_base = OTHER; note = 2'-O-methyl nucleotide
  modified_base 69: mod_base = OTHER; note = 2'-O-methyl nucleotide
  modified_base 70: mod_base = OTHER; note = 2'-O-methyl nucleotide
  modified_base 75: mod_base = OTHER; note = 2'-O-methyl nucleotide
  modified_base 77: mod_base = OTHER; note = 2'-O-methyl nucleotide
  modified_base 80: mod_base = OTHER; note = 2'-O-methyl nucleotide
  modified_base 86: mod_base = OTHER; note = 2'-O-methyl nucleotide
  modified_base 87: mod_base = OTHER; note = 2'-O-methyl nucleotide
  modified_base 89: mod_base = OTHER; note = 2'-O-methyl nucleotide
  modified_base 90: mod_base = OTHER; note = 2'-O-methyl nucleotide
  modified_base 91: mod_base = OTHER; note = 2'-O-methyl nucleotide
  modified_base 92: mod_base = OTHER; note = 2'-O-methyl nucleotide
  modified_base 99: mod_base = OTHER; note = phosphorothioate linkage
  modified_base 100: mod_base = OTHER; note = 2'-O-methyl nucleotide, phosphorothioate linkage
  modified_base 101: mod_base = OTHER; note = 2'-O-methyl nucleotide
  source 1..101: mol_type = other RNA

SEQ ID NO: 453 - RNA, 101 nt, synthetic construct; identical to SEQ ID NO: 427
  misc_feature 1..101: note = Synthetic
  modified_base 1: mod_base = OTHER; note = 2'-O-methyl nucleotide, phosphorothioate linkage
  modified_base 2: mod_base = OTHER; note = 2'-O-methyl nucleotide, phosphorothioate linkage
  modified_base 3: mod_base = OTHER; note = 2'-O-methyl nucleotide, phosphorothioate linkage
  modified_base 4: mod_base = OTHER; note = 2'-O-methyl nucleotide
  modified_base 5: mod_base = OTHER; note = 2'-O-methyl nucleotide
  modified_base 8: mod_base = OTHER; note = 2'-O-methyl nucleotide
  modified_base 9: mod_base = OTHER; note = 2'-O-methyl nucleotide
  modified_base 11: mod_base = OTHER; note = 2'-O-methyl nucleotide
  modified_base 13: mod_base = OTHER; note = 2'-O-methyl nucleotide
  modified_base 18: mod_base = OTHER; note = 2'-O-methyl nucleotide
  modified_base 22: mod_base = OTHER; note = 2'-O-methyl nucleotide
  modified_base 25: mod_base = OTHER; note = 2'-O-methyl nucleotide
  modified_base 29: mod_base = OTHER; note = 2'-O-methyl nucleotide
  modified_base 30: mod_base = OTHER; note = 2'-O-methyl nucleotide
  modified_base 31: mod_base = OTHER; note = 2'-O-methyl nucleotide
  modified_base 32: mod_base = OTHER; note = 2'-O-methyl nucleotide
  modified_base 37: mod_base = OTHER; note = 2'-O-methyl nucleotide
  modified_base 38: mod_base = OTHER; note = 2'-O-methyl nucleotide
  modified_base 39: mod_base = OTHER; note = 2'-O-methyl nucleotide
  modified_base 40: mod_base = OTHER; note = 2'-O-methyl nucleotide
  modified_base 41: mod_base = OTHER; note = 2'-O-methyl nucleotide
  modified_base 42: mod_base = OTHER; note = 2'-O-methyl nucleotide
  modified_base 43: mod_base = OTHER; note = 2'-O-methyl nucleotide
  modified_base 47: mod_base = OTHER; note = 2'-O-methyl nucleotide
  modified_base 48: mod_base = OTHER; note = 2'-O-methyl nucleotide
  modified_base 51: mod_base = OTHER; note = 2'-O-methyl nucleotide
  modified_base 54: mod_base = OTHER; note = phosphorothioate linkage
  modified_base 58: mod_base = OTHER; note = 2'-O-methyl nucleotide
  modified_base 59: mod_base = OTHER; note = 2'-O-methyl nucleotide
  modified_base 61: mod_base = OTHER; note = 2'-O-methyl nucleotide
  modified_base 62: mod_base = OTHER; note = 2'-O-methyl nucleotide
  modified_base 63: mod_base = OTHER; note = 2'-O-methyl nucleotide
  modified_base 64: mod_base = OTHER; note = 2'-O-methyl nucleotide
  modified_base 65: mod_base = OTHER; note = 2'-O-methyl nucleotide
  modified_base 66: mod_base = OTHER; note = 2'-O-methyl nucleotide
  modified_base 67: mod_base = OTHER; note = 2'-O-methyl nucleotide
  modified_base 68: mod_base = OTHER; note = 2'-O-methyl nucleotide
  modified_base 69: mod_base = OTHER; note = 2'-O-methyl nucleotide
  modified_base 70: mod_base = OTHER; note = 2'-O-methyl nucleotide
  modified_base 75: mod_base = OTHER; note = 2'-O-methyl nucleotide
  modified_base 77: mod_base = OTHER; note = 2'-O-methyl nucleotide
  modified_base 80: mod_base = OTHER; note = 2'-O-methyl nucleotide
  modified_base 86: mod_base = OTHER; note = 2'-O-methyl nucleotide
  modified_base 87: mod_base = OTHER; note = 2'-O-methyl nucleotide
  modified_base 89: mod_base = OTHER; note = 2'-O-methyl nucleotide
  modified_base 90: mod_base = OTHER; note = 2'-O-methyl nucleotide
  modified_base 91: mod_base = OTHER; note = 2'-O-methyl nucleotide
  modified_base 92: mod_base = OTHER; note = 2'-O-methyl nucleotide
  modified_base 99: mod_base = OTHER; note = phosphorothioate linkage
  modified_base 100: mod_base = OTHER; note = 2'-O-methyl nucleotide, phosphorothioate linkage
  modified_base 101: mod_base = OTHER; note = 2'-O-methyl nucleotide
  source 1..101: mol_type = other RNA

SEQ ID NO: 454 - RNA, 101 nt, synthetic construct; identical to SEQ ID NO: 427
  misc_feature 1..101: note = Synthetic
  modified_base 1: mod_base = OTHER; note = 2'-O-methyl nucleotide, phosphorothioate linkage
  modified_base 2: mod_base = OTHER; note = 2'-O-methyl nucleotide, phosphorothioate linkage
  modified_base 3: mod_base = OTHER; note = 2'-O-methyl nucleotide, phosphorothioate linkage
  modified_base 4: mod_base = OTHER; note = 2'-O-methyl nucleotide
  modified_base 5: mod_base = OTHER; note = 2'-O-methyl nucleotide
  modified_base 8: mod_base = OTHER; note = 2'-O-methyl nucleotide
  modified_base 9: mod_base = OTHER; note = 2'-O-methyl nucleotide
  modified_base 11: mod_base = OTHER; note = 2'-O-methyl nucleotide
  modified_base 13: mod_base = OTHER; note = 2'-O-methyl nucleotide
  modified_base 18: mod_base = OTHER; note = 2'-O-methyl nucleotide
  modified_base 22: mod_base = OTHER; note = 2'-O-methyl nucleotide
  modified_base 25: mod_base = OTHER; note = 2'-O-methyl nucleotide
  modified_base 29: mod_base = OTHER; note = 2'-O-methyl nucleotide
  modified_base 30: mod_base = OTHER; note = 2'-O-methyl nucleotide
  modified_base 31: mod_base = OTHER; note = 2'-O-methyl nucleotide
  modified_base 32: mod_base = OTHER; note = 2'-O-methyl nucleotide
  modified_base 37: mod_base = OTHER; note = 2'-O-methyl nucleotide
  modified_base 38: mod_base = OTHER; note = 2'-O-methyl nucleotide
  modified_base 39: mod_base = OTHER; note = 2'-O-methyl nucleotide
  modified_base 40: mod_base = OTHER; note = 2'-O-methyl nucleotide
  modified_base 41: mod_base = OTHER; note = 2'-O-methyl nucleotide
  modified_base 42: mod_base = OTHER; note = 2'-O-methyl nucleotide
  modified_base 43: mod_base = OTHER; note = 2'-O-methyl nucleotide
  modified_base 47: mod_base = OTHER; note = 2'-O-methyl nucleotide
  modified_base 48: mod_base = OTHER; note = 2'-O-methyl nucleotide
  modified_base 51: mod_base = OTHER; note = 2'-O-methyl nucleotide
  modified_base 58: mod_base = OTHER; note = 2'-O-methyl nucleotide
  modified_base 59: mod_base = OTHER; note = 2'-O-methyl nucleotide
  modified_base 61: mod_base = OTHER; note = 2'-O-methyl nucleotide
  modified_base 62: mod_base = OTHER; note = 2'-O-methyl nucleotide
  modified_base 63: mod_base = OTHER; note = 2'-O-methyl nucleotide
  modified_base 64: mod_base = OTHER; note = 2'-O-methyl nucleotide
  modified_base 65: mod_base = OTHER; note = 2'-O-methyl nucleotide
  modified_base 66: mod_base = OTHER; note = 2'-O-methyl nucleotide
  modified_base 67: mod_base = OTHER; note = 2'-O-methyl nucleotide
  modified_base 68: mod_base = OTHER; note = 2'-O-methyl nucleotide
  modified_base 69: mod_base = OTHER; note = 2'-O-methyl nucleotide
  modified_base 70: mod_base = OTHER; note = 2'-O-methyl nucleotide
  modified_base 75: mod_base = OTHER; note = 2'-O-methyl nucleotide
  modified_base 77: mod_base = OTHER; note = 2'-O-methyl nucleotide
  modified_base 80: mod_base = OTHER; note = 2'-O-methyl nucleotide
  modified_base 86: mod_base = OTHER; note = 2'-O-methyl nucleotide
  modified_base 87: mod_base = OTHER; note = 2'-O-methyl nucleotide
  modified_base 89: mod_base = OTHER; note = 2'-O-methyl nucleotide
  modified_base 90: mod_base = OTHER; note = 2'-O-methyl nucleotide
  modified_base 91: mod_base = OTHER; note = 2'-O-methyl nucleotide
  modified_base 92: mod_base = OTHER; note = 2'-O-methyl nucleotide
  modified_base 99: mod_base = OTHER; note = phosphorothioate linkage
  modified_base 100: mod_base = OTHER; note = 2'-O-methyl nucleotide, phosphorothioate linkage
  modified_base 101: mod_base = OTHER; note = 2'-O-methyl nucleotide
  source 1..101: mol_type = other RNA

SEQ ID NO: 455 - RNA, 101 nt, synthetic construct; identical to SEQ ID NO: 428
  misc_feature 1..101: note = Synthetic
  modified_base 1: mod_base = OTHER; note = 2'-O-methyl nucleotide, phosphorothioate linkage
  modified_base 2: mod_base = OTHER; note = 2'-O-methyl nucleotide, phosphorothioate linkage
  modified_base 3: mod_base = OTHER; note = 2'-O-methyl nucleotide, phosphorothioate linkage
  modified_base 4: mod_base = OTHER; note = 2'-O-methyl nucleotide
  modified_base 5: mod_base = OTHER; note = 2'-O-methyl nucleotide
  modified_base 8: mod_base = OTHER; note = 2'-O-methyl nucleotide
  modified_base 9: mod_base = OTHER; note = 2'-O-methyl nucleotide
  modified_base 11: mod_base = OTHER; note = 2'-O-methyl nucleotide
  modified_base 13: mod_base = OTHER; note = 2'-O-methyl nucleotide
  modified_base 18: mod_base = OTHER; note = 2'-O-methyl nucleotide
  modified_base 22: mod_base = OTHER; note = 2'-O-methyl nucleotide
  modified_base 25: mod_base = OTHER; note = 2'-O-methyl nucleotide
  modified_base 29: mod_base = OTHER; note = 2'-O-methyl nucleotide
  modified_base 30: mod_base = OTHER; note = 2'-O-methyl nucleotide
  modified_base 31: mod_base = OTHER; note = 2'-O-methyl nucleotide
  modified_base 32: mod_base = OTHER; note = 2'-O-methyl nucleotide
  modified_base 37: mod_base = OTHER; note = 2'-O-methyl nucleotide
  modified_base 38: mod_base = OTHER; note = 2'-O-methyl nucleotide
  modified_base 39: mod_base = OTHER; note = 2'-O-methyl nucleotide
  modified_base 40: mod_base = OTHER; note = 2'-O-methyl nucleotide
  modified_base 41: mod_base = OTHER; note = 2'-O-methyl nucleotide
  modified_base 42: mod_base = OTHER; note = 2'-O-methyl nucleotide
  modified_base 43: mod_base = OTHER; note = 2'-O-methyl nucleotide
  modified_base 47: mod_base = OTHER; note = 2'-O-methyl nucleotide
  modified_base 48: mod_base = OTHER; note = 2'-O-methyl nucleotide
  modified_base 51: mod_base = OTHER; note = 2'-O-methyl nucleotide
  modified_base 54: mod_base = OTHER; note = phosphorothioate linkage
  modified_base 58: mod_base = OTHER; note = 2'-O-methyl nucleotide
  modified_base 59: mod_base = OTHER; note = 2'-O-methyl nucleotide
  modified_base 61: mod_base = OTHER; note = 2'-O-methyl nucleotide
  modified_base 62: mod_base = OTHER; note = 2'-O-methyl nucleotide
  modified_base 63: mod_base = OTHER; note = 2'-O-methyl nucleotide
  modified_base 64: mod_base = OTHER; note = 2'-O-methyl nucleotide
  modified_base 65: mod_base = OTHER; note = 2'-O-methyl nucleotide
  modified_base 66: mod_base = OTHER; note = 2'-O-methyl nucleotide
  modified_base 67: mod_base = OTHER; note = 2'-O-methyl nucleotide
  modified_base 68: mod_base = OTHER; note = 2'-O-methyl nucleotide
  modified_base 69: mod_base = OTHER; note = 2'-O-methyl nucleotide
  modified_base 70: mod_base = OTHER; note = 2'-O-methyl nucleotide
  modified_base 75: mod_base = OTHER; note = 2'-O-methyl nucleotide
  modified_base 77: mod_base = OTHER; note = 2'-O-methyl nucleotide
  modified_base 80: mod_base = OTHER; note = 2'-O-methyl nucleotide
  modified_base 86: mod_base = OTHER; note = 2'-O-methyl nucleotide
  modified_base 87: mod_base = OTHER; note = 2'-O-methyl nucleotide
  modified_base 89: mod_base = OTHER; note = 2'-O-methyl nucleotide
  modified_base 90: mod_base = OTHER; note = 2'-O-methyl nucleotide
  modified_base 91: mod_base = OTHER; note = 2'-O-methyl nucleotide
  modified_base 92: mod_base = OTHER; note = 2'-O-methyl nucleotide
  modified_base 99: mod_base = OTHER; note = phosphorothioate linkage
  modified_base 100: mod_base = OTHER; note = 2'-O-methyl nucleotide, phosphorothioate linkage
  modified_base 101: mod_base = OTHER; note = 2'-O-methyl nucleotide
  source 1..101: mol_type = other RNA

SEQ ID NO: 456 - RNA, 101 nt, synthetic construct; identical to SEQ ID NO: 428
  misc_feature 1..101: note = Synthetic
  modified_base 1: mod_base = OTHER; note = 2'-O-methyl nucleotide, phosphorothioate linkage
  modified_base 2: mod_base = OTHER; note = 2'-O-methyl nucleotide, phosphorothioate linkage
  modified_base 3: mod_base = OTHER; note = 2'-O-methyl nucleotide, phosphorothioate linkage
  modified_base 4: mod_base = OTHER; note = 2'-O-methyl nucleotide
  modified_base 5: mod_base = OTHER; note = 2'-O-methyl nucleotide
  modified_base 8: mod_base = OTHER; note = 2'-O-methyl nucleotide
  modified_base 9: mod_base = OTHER; note = 2'-O-methyl nucleotide
  modified_base 11: mod_base = OTHER; note = 2'-O-methyl nucleotide
  modified_base 13: mod_base = OTHER; note = 2'-O-methyl nucleotide
  modified_base 18: mod_base = OTHER; note = 2'-O-methyl nucleotide
  modified_base 22: mod_base = OTHER; note = 2'-O-methyl nucleotide
  modified_base 25: mod_base = OTHER; note = 2'-O-methyl nucleotide
  modified_base 29: mod_base = OTHER; note = 2'-O-methyl nucleotide
  modified_base 30: mod_base = OTHER; note = 2'-O-methyl nucleotide
  modified_base 31: mod_base = OTHER; note = 2'-O-methyl nucleotide
  modified_base 32: mod_base = OTHER; note = 2'-O-methyl nucleotide
  modified_base 37: mod_base = OTHER; note = 2'-O-methyl nucleotide
  modified_base 38: mod_base = OTHER; note = 2'-O-methyl nucleotide
  modified_base 39: mod_base = OTHER; note = 2'-O-methyl nucleotide
  modified_base 40: mod_base = OTHER; note = 2'-O-methyl nucleotide
  modified_base 41: mod_base = OTHER; note = 2'-O-methyl nucleotide
  modified_base 42: mod_base = OTHER; note = 2'-O-methyl nucleotide
  modified_base 43: mod_base = OTHER; note = 2'-O-methyl nucleotide
  modified_base 47: mod_base = OTHER; note = 2'-O-methyl nucleotide
  modified_base 48: mod_base = OTHER; note = 2'-O-methyl nucleotide
  modified_base 51: mod_base = OTHER; note = 2'-O-methyl nucleotide
  modified_base 58: mod_base = OTHER; note = 2'-O-methyl nucleotide
  modified_base 59: mod_base = OTHER; note = 2'-O-methyl nucleotide
  modified_base 61: mod_base = OTHER; note = 2'-O-methyl nucleotide
  modified_base 62: mod_base = OTHER; note = 2'-O-methyl nucleotide
  modified_base 63: mod_base = OTHER; note = 2'-O-methyl nucleotide
  modified_base 64: mod_base = OTHER; note = 2'-O-methyl nucleotide
  modified_base 65: mod_base = OTHER; note = 2'-O-methyl nucleotide
  modified_base 66: mod_base = OTHER; note = 2'-O-methyl nucleotide
  modified_base 67: mod_base = OTHER; note = 2'-O-methyl nucleotide
  modified_base 68: mod_base = OTHER; note = 2'-O-methyl nucleotide
  modified_base 69: mod_base = OTHER; note = 2'-O-methyl nucleotide
  modified_base 70: mod_base = OTHER; note = 2'-O-methyl nucleotide
  modified_base 75: mod_base = OTHER; note = 2'-O-methyl nucleotide
  modified_base 77: mod_base = OTHER; note = 2'-O-methyl nucleotide
  modified_base 80: mod_base = OTHER; note = 2'-O-methyl nucleotide
  modified_base 86: mod_base = OTHER; note = 2'-O-methyl nucleotide
  modified_base 87: mod_base = OTHER; note = 2'-O-methyl nucleotide
  modified_base 89: mod_base = OTHER; note = 2'-O-methyl nucleotide
  modified_base 90: mod_base = OTHER; note = 2'-O-methyl nucleotide
  modified_base 91: mod_base = OTHER; note = 2'-O-methyl nucleotide
  modified_base 92: mod_base = OTHER; note = 2'-O-methyl nucleotide
  modified_base 99: mod_base = OTHER; note = phosphorothioate linkage
  modified_base 100: mod_base = OTHER; note = 2'-O-methyl nucleotide, phosphorothioate linkage
  modified_base 101: mod_base = OTHER; note = 2'-O-methyl nucleotide
  source 1..101: mol_type = other RNA

SEQ ID NO: 457 - RNA, 101 nt, synthetic construct; identical to SEQ ID NO: 429
  misc_feature 1..101: note = Synthetic
  modified_base 1: mod_base = OTHER; note = 2'-O-methyl nucleotide, phosphorothioate linkage
  modified_base 2: mod_base = OTHER; note = 2'-O-methyl nucleotide, phosphorothioate linkage
  modified_base 3: mod_base = OTHER; note = 2'-O-methyl nucleotide, phosphorothioate linkage
  modified_base 4: mod_base = OTHER; note = 2'-O-methyl nucleotide
  modified_base 5: mod_base = OTHER; note = 2'-O-methyl nucleotide
  modified_base 8: mod_base = OTHER; note = 2'-O-methyl nucleotide
  modified_base 9: mod_base = OTHER; note = 2'-O-methyl nucleotide
  modified_base 11: mod_base = OTHER; note = 2'-O-methyl nucleotide
  modified_base 13: mod_base = OTHER; note = 2'-O-methyl nucleotide
  modified_base 18: mod_base = OTHER; note = 2'-O-methyl nucleotide
  modified_base 22: mod_base = OTHER; note = 2'-O-methyl nucleotide
  modified_base 25: mod_base = OTHER; note = 2'-O-methyl nucleotide
  modified_base 29: mod_base = OTHER; note = 2'-O-methyl nucleotide
  modified_base 30: mod_base = OTHER; note = 2'-O-methyl nucleotide
  modified_base 31: mod_base = OTHER; note = 2'-O-methyl nucleotide
  modified_base 32: mod_base = OTHER; note = 2'-O-methyl nucleotide
  modified_base 37: mod_base = OTHER; note = 2'-O-methyl nucleotide
  modified_base 38: mod_base = OTHER; note = 2'-O-methyl nucleotide
  modified_base 39: mod_base = OTHER; note = 2'-O-methyl nucleotide
  modified_base 40: mod_base = OTHER; note = 2'-O-methyl nucleotide
  modified_base 41: mod_base = OTHER; note = 2'-O-methyl nucleotide
  modified_base 42: mod_base = OTHER; note = 2'-O-methyl nucleotide
  modified_base 43: mod_base = OTHER; note = 2'-O-methyl nucleotide
  modified_base 47: mod_base = OTHER; note = 2'-O-methyl nucleotide
  modified_base 48: mod_base = OTHER; note = 2'-O-methyl nucleotide
  modified_base 51: mod_base = OTHER; note = 2'-O-methyl nucleotide
  modified_base 54: mod_base = OTHER; note = phosphorothioate linkage
  modified_base 58: mod_base = OTHER; note = 2'-O-methyl nucleotide
  modified_base 59: mod_base = OTHER; note = 2'-O-methyl nucleotide
  modified_base 61: mod_base = OTHER; note = 2'-O-methyl nucleotide
  modified_base 62: mod_base = OTHER; note = 2'-O-methyl nucleotide
  modified_base 63: mod_base = OTHER; note = 2'-O-methyl nucleotide
  modified_base 64: mod_base = OTHER; note = 2'-O-methyl nucleotide
  modified_base 65: mod_base = OTHER; note = 2'-O-methyl nucleotide
  modified_base 66: mod_base = OTHER; note = 2'-O-methyl nucleotide
  modified_base 67: mod_base = OTHER; note = 2'-O-methyl nucleotide
  modified_base 68: mod_base = OTHER; note = 2'-O-methyl nucleotide
  modified_base 69: mod_base = OTHER; note = 2'-O-methyl nucleotide
  modified_base 70: mod_base = OTHER; note = 2'-O-methyl nucleotide
  modified_base 75: mod_base = OTHER; note = 2'-O-methyl nucleotide
  modified_base 77: mod_base = OTHER; note = 2'-O-methyl nucleotide
  modified_base 80: mod_base = OTHER; note = 2'-O-methyl nucleotide
  modified_base 86: mod_base = OTHER; note = 2'-O-methyl nucleotide
  modified_base 87: mod_base = OTHER; note = 2'-O-methyl nucleotide
  modified_base 89: mod_base = OTHER; note = 2'-O-methyl nucleotide
  modified_base 90: mod_base = OTHER; note = 2'-O-methyl nucleotide
  modified_base 91: mod_base = OTHER; note = 2'-O-methyl nucleotide
  modified_base 92: mod_base = OTHER; note = 2'-O-methyl nucleotide
  modified_base 99: mod_base = OTHER; note = phosphorothioate linkage
  modified_base 100: mod_base = OTHER; note = 2'-O-methyl nucleotide, phosphorothioate linkage
  modified_base 101: mod_base = OTHER; note = 2'-O-methyl nucleotide
  source 1..101: mol_type = other RNA

SEQ ID NO: 458 - RNA, 101 nt, synthetic construct; identical to SEQ ID NO: 429
  misc_feature 1..101: note = Synthetic
  modified_base 1: mod_base = OTHER; note = 2'-O-methyl nucleotide, phosphorothioate linkage
  modified_base 2: mod_base = OTHER; note = 2'-O-methyl nucleotide, phosphorothioate linkage
  modified_base 3: mod_base = OTHER; note = 2'-O-methyl nucleotide, phosphorothioate linkage
  modified_base 4: mod_base = OTHER; note = 2'-O-methyl nucleotide
  modified_base 5: mod_base = OTHER; note = 2'-O-methyl nucleotide
  modified_base 8: mod_base = OTHER; note = 2'-O-methyl nucleotide
  modified_base 9: mod_base = OTHER; note = 2'-O-methyl nucleotide
  modified_base 11: mod_base = OTHER; note = 2'-O-methyl nucleotide
  modified_base 13: mod_base = OTHER; note = 2'-O-methyl nucleotide
  modified_base 18: mod_base = OTHER; note = 2'-O-methyl nucleotide
  modified_base 22: mod_base = OTHER; note = 2'-O-methyl nucleotide
  modified_base 25: mod_base = OTHER; note = 2'-O-methyl nucleotide
  modified_base 29: mod_base = OTHER; note = 2'-O-methyl nucleotide
  modified_base 30: mod_base = OTHER; note = 2'-O-methyl nucleotide
  modified_base 31: mod_base = OTHER; note = 2'-O-methyl nucleotide
  modified_base 32: mod_base = OTHER; note = 2'-O-methyl nucleotide
  modified_base 37: mod_base = OTHER; note = 2'-O-methyl nucleotide
  modified_base 38: mod_base = OTHER; note = 2'-O-methyl nucleotide
  modified_base 39: mod_base = OTHER; note = 2'-O-methyl nucleotide
  modified_base 40: mod_base = OTHER; note = 2'-O-methyl nucleotide
  modified_base 41: mod_base = OTHER; note = 2'-O-methyl nucleotide
  modified_base 42: mod_base = OTHER; note = 2'-O-methyl nucleotide
  modified_base 43: mod_base = OTHER; note = 2'-O-methyl nucleotide
  modified_base 47: mod_base = OTHER; note = 2'-O-methyl nucleotide
  modified_base 48: mod_base = OTHER; note = 2'-O-methyl nucleotide
  modified_base 51: mod_base = OTHER; note = 2'-O-methyl nucleotide
  modified_base 58: mod_base = OTHER; note = 2'-O-methyl nucleotide
  modified_base 59: mod_base = OTHER; note = 2'-O-methyl nucleotide
  modified_base 61: mod_base = OTHER; note = 2'-O-methyl nucleotide
  modified_base 62: mod_base = OTHER; note = 2'-O-methyl nucleotide
  modified_base 63: mod_base = OTHER; note = 2'-O-methyl nucleotide
  modified_base 64: mod_base = OTHER; note = 2'-O-methyl nucleotide
  modified_base 65: mod_base = OTHER; note = 2'-O-methyl nucleotide
  modified_base 66: mod_base = OTHER; note = 2'-O-methyl nucleotide
  modified_base 67: mod_base = OTHER; note = 2'-O-methyl nucleotide
  modified_base 68: mod_base = OTHER; note = 2'-O-methyl nucleotide
  modified_base 69: mod_base = OTHER; note = 2'-O-methyl nucleotide
  modified_base 70: mod_base = OTHER; note = 2'-O-methyl nucleotide
  modified_base 75: mod_base = OTHER; note = 2'-O-methyl nucleotide
  modified_base 77: mod_base = OTHER; note = 2'-O-methyl nucleotide
  modified_base 80: mod_base = OTHER; note = 2'-O-methyl nucleotide
  modified_base 86: mod_base = OTHER; note = 2'-O-methyl nucleotide
  modified_base 87: mod_base = OTHER; note = 2'-O-methyl nucleotide
  modified_base 89: mod_base = OTHER; note = 2'-O-methyl nucleotide
  modified_base 90: mod_base = OTHER; note = 2'-O-methyl nucleotide
  modified_base 91: mod_base = OTHER; note = 2'-O-methyl nucleotide
  modified_base 92: mod_base = OTHER; note = 2'-O-methyl nucleotide
  modified_base 99: mod_base = OTHER; note = phosphorothioate linkage
  modified_base 100: mod_base = OTHER; note = 2'-O-methyl nucleotide, phosphorothioate linkage
  modified_base 101: mod_base = OTHER; note = 2'-O-methyl nucleotide
  source 1..101: mol_type = other RNA

SEQ ID NO: 459 - RNA, 101 nt, synthetic construct; identical to SEQ ID NO: 430
  misc_feature 1..101: note = Synthetic
  modified_base 1: mod_base = OTHER; note = 2'-O-methyl nucleotide, phosphorothioate linkage
  modified_base 2: mod_base = OTHER; note = 2'-O-methyl nucleotide, phosphorothioate linkage
  modified_base 3: mod_base = OTHER; note = 2'-O-methyl nucleotide, phosphorothioate linkage
  modified_base 4: mod_base = OTHER; note = 2'-O-methyl nucleotide
  modified_base 5: mod_base = OTHER; note = 2'-O-methyl nucleotide
  modified_base 8: mod_base = OTHER; note = 2'-O-methyl nucleotide
  modified_base 9: mod_base = OTHER; note = 2'-O-methyl nucleotide
  modified_base 11: mod_base = OTHER; note = 2'-O-methyl nucleotide
  modified_base 13: mod_base = OTHER; note = 2'-O-methyl nucleotide
  modified_base 18: mod_base = OTHER; note = 2'-O-methyl nucleotide
  modified_base 22: mod_base = OTHER; note = 2'-O-methyl nucleotide
  modified_base 25: mod_base = OTHER; note = 2'-O-methyl nucleotide
  modified_base 29: mod_base = OTHER; note = 2'-O-methyl nucleotide
  modified_base 30: mod_base = OTHER; note = 2'-O-methyl nucleotide
  modified_base 31: mod_base = OTHER; note = 2'-O-methyl nucleotide
  modified_base 32: mod_base = OTHER; note = 2'-O-methyl nucleotide
  modified_base 37: mod_base = OTHER; note = 2'-O-methyl nucleotide
  modified_base 38: mod_base = OTHER; note = 2'-O-methyl nucleotide
  modified_base 39: mod_base = OTHER; note = 2'-O-methyl nucleotide
  modified_base 40: mod_base = OTHER; note = 2'-O-methyl nucleotide
  modified_base 41: mod_base = OTHER; note = 2'-O-methyl nucleotide
  modified_base 42: mod_base = OTHER; note = 2'-O-methyl nucleotide
  modified_base 43: mod_base = OTHER; note = 2'-O-methyl nucleotide
  modified_base 47: mod_base = OTHER; note = 2'-O-methyl nucleotide
  modified_base 48: mod_base = OTHER; note = 2'-O-methyl nucleotide
  modified_base 51: mod_base = OTHER; note = 2'-O-methyl nucleotide
  modified_base 54: mod_base = OTHER; note = phosphorothioate linkage
  modified_base 58: mod_base = OTHER; note = 2'-O-methyl nucleotide
  modified_base 59: mod_base = OTHER; note = 2'-O-methyl nucleotide
  modified_base 61: mod_base = OTHER; note = 2'-O-methyl nucleotide
  modified_base 62: mod_base = OTHER; note = 2'-O-methyl nucleotide
  modified_base 63: mod_base = OTHER; note = 2'-O-methyl nucleotide
  modified_base 64: mod_base = OTHER; note = 2'-O-methyl nucleotide
  modified_base 65: mod_base = OTHER; note = 2'-O-methyl nucleotide
  modified_base 66: mod_base = OTHER; note = 2'-O-methyl nucleotide
  modified_base 67: mod_base = OTHER; note = 2'-O-methyl nucleotide
  modified_base 68: mod_base = OTHER; note = 2'-O-methyl nucleotide
  modified_base 69: mod_base = OTHER; note = 2'-O-methyl nucleotide
  modified_base 70: mod_base = OTHER; note = 2'-O-methyl nucleotide
  modified_base 75: mod_base = OTHER; note = 2'-O-methyl nucleotide
  modified_base 77: mod_base = OTHER; note = 2'-O-methyl nucleotide
  modified_base 80: mod_base = OTHER; note = 2'-O-methyl nucleotide
  modified_base 86: mod_base = OTHER; note = 2'-O-methyl nucleotide
  modified_base 87: mod_base = OTHER; note = 2'-O-methyl nucleotide
  modified_base 89: mod_base = OTHER; note = 2'-O-methyl nucleotide
  modified_base 90: mod_base = OTHER; note = 2'-O-methyl nucleotide
  modified_base 91: mod_base = OTHER; note = 2'-O-methyl nucleotide
  modified_base 92: mod_base = OTHER; note = 2'-O-methyl nucleotide
  modified_base 99: mod_base = OTHER; note = phosphorothioate linkage
  modified_base 100: mod_base = OTHER; note = 2'-O-methyl nucleotide, phosphorothioate linkage
  modified_base 101: mod_base = OTHER; note = 2'-O-methyl nucleotide
  source 1..101: mol_type = other RNA

SEQ ID NO: 460 - RNA, 101 nt, synthetic construct; identical to SEQ ID NO: 430
  misc_feature 1..101: note = Synthetic
  modified_base 1: mod_base = OTHER; note = 2'-O-methyl nucleotide, phosphorothioate linkage
  modified_base 2: mod_base = OTHER; note = 2'-O-methyl nucleotide, phosphorothioate linkage
  modified_base 3: mod_base = OTHER; note = 2'-O-methyl nucleotide, phosphorothioate linkage
  modified_base 4: mod_base = OTHER; note = 2'-O-methyl nucleotide
  modified_base 5: mod_base = OTHER; note = 2'-O-methyl nucleotide
  modified_base 8: mod_base = OTHER; note = 2'-O-methyl nucleotide
  modified_base 9: mod_base = OTHER; note = 2'-O-methyl nucleotide
  modified_base 11: mod_base = OTHER; note = 2'-O-methyl nucleotide
  modified_base 13: mod_base = OTHER; note = 2'-O-methyl nucleotide
  modified_base 18: mod_base = OTHER; note = 2'-O-methyl nucleotide
  modified_base 22: mod_base = OTHER; note = 2'-O-methyl nucleotide
  modified_base 25: mod_base = OTHER; note = 2'-O-methyl nucleotide
  modified_base 29: mod_base = OTHER; note = 2'-O-methyl nucleotide
  modified_base 30: mod_base = OTHER; note = 2'-O-methyl nucleotide
  modified_base 31: mod_base = OTHER; note = 2'-O-methyl nucleotide
  modified_base 32: mod_base = OTHER; note = 2'-O-methyl nucleotide
  modified_base 37: mod_base = OTHER; note = 2'-O-methyl nucleotide
  modified_base 38: mod_base = OTHER; note = 2'-O-methyl nucleotide
  modified_base 39: mod_base = OTHER; note = 2'-O-methyl nucleotide
  modified_base 40: mod_base = OTHER; note = 2'-O-methyl nucleotide
  modified_base 41: mod_base = OTHER; note = 2'-O-methyl nucleotide
  modified_base 42: mod_base = OTHER; note = 2'-O-methyl nucleotide
  modified_base 43: mod_base = OTHER; note = 2'-O-methyl nucleotide
  modified_base 47: mod_base = OTHER; note = 2'-O-methyl nucleotide
  modified_base 48: mod_base = OTHER; note = 2'-O-methyl nucleotide
  modified_base 51: mod_base = OTHER; note = 2'-O-methyl nucleotide
  modified_base 58: mod_base = OTHER; note = 2'-O-methyl nucleotide
  modified_base 59: mod_base = OTHER; note = 2'-O-methyl nucleotide
  modified_base 61: mod_base = OTHER; note = 2'-O-methyl nucleotide
  modified_base 62: mod_base = OTHER; note = 2'-O-methyl nucleotide
  modified_base 63: mod_base = OTHER; note = 2'-O-methyl nucleotide
  modified_base 64: mod_base = OTHER; note = 2'-O-methyl nucleotide
  modified_base 65: mod_base = OTHER; note = 2'-O-methyl nucleotide
  modified_base 66: mod_base = OTHER; note = 2'-O-methyl nucleotide
  modified_base 67: mod_base = OTHER; note = 2'-O-methyl nucleotide
  modified_base 68: mod_base = OTHER; note = 2'-O-methyl nucleotide
  modified_base 69: mod_base = OTHER; note = 2'-O-methyl nucleotide
  modified_base 70: mod_base = OTHER; note = 2'-O-methyl nucleotide
  modified_base 75: mod_base = OTHER; note = 2'-O-methyl nucleotide
  modified_base 77: mod_base = OTHER; note = 2'-O-methyl nucleotide
  modified_base 80: mod_base = OTHER; note = 2'-O-methyl nucleotide
  modified_base 86: mod_base = OTHER; note = 2'-O-methyl nucleotide
  modified_base 87: mod_base = OTHER; note = 2'-O-methyl nucleotide
  modified_base 89: mod_base = OTHER; note = 2'-O-methyl nucleotide
  modified_base 90: mod_base = OTHER; note = 2'-O-methyl nucleotide
  modified_base 91: mod_base = OTHER; note = 2'-O-methyl nucleotide
  modified_base 92: mod_base = OTHER; note = 2'-O-methyl nucleotide
  modified_base 99: mod_base = OTHER; note = phosphorothioate linkage
  modified_base 100: mod_base = OTHER; note = 2'-O-methyl nucleotide, phosphorothioate linkage
  modified_base 101: mod_base = OTHER; note = 2'-O-methyl nucleotide
  source 1..101: mol_type = other RNA

SEQ ID NO: 461 - RNA, 100 nt, synthetic construct; identical to SEQ ID NO: 431
  misc_feature 1..100: note = Synthetic
  modified_base 1: mod_base = OTHER; note = 2'-O-methyl nucleotide, phosphorothioate linkage
  modified_base 2: mod_base = OTHER; note = 2'-O-methyl nucleotide, phosphorothioate linkage
  modified_base 3: mod_base = OTHER; note = 2'-O-methyl nucleotide, phosphorothioate linkage
  modified_base 29: mod_base = OTHER; note = 2'-O-methyl nucleotide
  modified_base 30: mod_base = OTHER; note = 2'-O-methyl nucleotide
  modified_base 31: mod_base = OTHER; note = 2'-O-methyl nucleotide
  modified_base 32: mod_base = OTHER; note = 2'-O-methyl nucleotide
  modified_base 33: mod_base = OTHER; note = 2'-O-methyl nucleotide
  modified_base 34: mod_base = OTHER; note = 2'-O-methyl nucleotide
  modified_base 35: mod_base = OTHER; note = 2'-O-methyl nucleotide
  modified_base 36: mod_base = OTHER; note = 2'-O-methyl nucleotide
  modified_base 37: mod_base = OTHER; note = 2'-O-methyl nucleotide
  modified_base 38: mod_base = OTHER; note = 2'-O-methyl nucleotide
  modified_base 39: mod_base = OTHER; note = 2'-O-methyl nucleotide
  modified_base 40: mod_base = OTHER; note = 2'-O-methyl nucleotide
  modified_base 69: mod_base = OTHER; note = 2'-O-methyl nucleotide
  modified_base 70: mod_base = OTHER; note = 2'-O-methyl nucleotide
  modified_base 71: mod_base = OTHER; note = 2'-O-methyl nucleotide
  modified_base 72: mod_base = OTHER; note = 2'-O-methyl nucleotide
  modified_base 73: mod_base = OTHER; note = 2'-O-methyl nucleotide
  modified_base 74: mod_base = OTHER; note = 2'-O-methyl nucleotide
  modified_base 75: mod_base = OTHER; note = 2'-O-methyl nucleotide
  modified_base 76: mod_base = OTHER; note = 2'-O-methyl nucleotide
  modified_base 77: mod_base = OTHER; note = 2'-O-methyl nucleotide
  modified_base 78: mod_base = OTHER; note = 2'-O-methyl nucleotide
  modified_base 79: mod_base = OTHER; note = 2'-O-methyl nucleotide
  modified_base 80: mod_base = OTHER; note = 2'-O-methyl nucleotide
  modified_base 81: mod_base = OTHER; note = 2'-O-methyl nucleotide
  modified_base 82: mod_base = OTHER; note = 2'-O-methyl nucleotide
  modified_base 83: mod_base = OTHER; note = 2'-O-methyl nucleotide
  modified_base 84: mod_base = OTHER; note = 2'-O-methyl nucleotide
  modified_base 85: mod_base = OTHER; note = 2'-O-methyl nucleotide
  modified_base 86: mod_base = OTHER; note = 2'-O-methyl nucleotide
  modified_base 87: mod_base = OTHER; note = 2'-O-methyl nucleotide
  modified_base 88: mod_base = OTHER; note = 2'-O-methyl nucleotide
  modified_base 89: mod_base = OTHER; note = 2'-O-methyl nucleotide
  modified_base 90: mod_base = OTHER; note = 2'-O-methyl nucleotide
  modified_base 91: mod_base = OTHER; note = 2'-O-methyl nucleotide
  modified_base 92: mod_base = OTHER; note = 2'-O-methyl nucleotide
  modified_base 93: mod_base = OTHER; note = 2'-O-methyl nucleotide
  modified_base 94: mod_base = OTHER; note = 2'-O-methyl nucleotide
  modified_base 95: mod_base = OTHER; note = 2'-O-methyl nucleotide
  modified_base 96: mod_base = OTHER; note = 2'-O-methyl nucleotide
  modified_base 97: mod_base = OTHER; note = 2'-O-methyl nucleotide, phosphorothioate linkage
  modified_base 98: mod_base = OTHER; note = 2'-O-methyl nucleotide, phosphorothioate linkage
  modified_base 99: mod_base = OTHER; note = 2'-O-methyl nucleotide, phosphorothioate linkage
  modified_base 100: mod_base = OTHER; note = 2'-O-methyl nucleotide
  source 1..100: mol_type = other RNA

SEQ ID NO: 462 - RNA, 100 nt, synthetic construct; identical to SEQ ID NO: 432
  misc_feature 1..100: note = Synthetic
  modified_base 1: mod_base = OTHER; note = 2'-O-methyl nucleotide, phosphorothioate linkage
  modified_base 2: mod_base = OTHER; note = 2'-O-methyl nucleotide, phosphorothioate linkage
  modified_base 4: mod_base = OTHER; note = 2'-O-methyl nucleotide, phosphorothioate linkage
  modified_base 29: mod_base = OTHER; note = 2'-O-methyl nucleotide
  modified_base 30: mod_base = OTHER; note = 2'-O-methyl nucleotide
  modified_base 31: mod_base = OTHER; note = 2'-O-methyl nucleotide
  modified_base 32: mod_base = OTHER; note = 2'-O-methyl nucleotide
  modified_base 33: mod_base = OTHER; note = 2'-O-methyl nucleotide
  modified_base 34: mod_base = OTHER; note = 2'-O-methyl nucleotide
  modified_base 35: mod_base = OTHER; note = 2'-O-methyl nucleotide
  modified_base 36: mod_base = OTHER; note = 2'-O-methyl nucleotide
  modified_base 37: mod_base = OTHER; note = 2'-O-methyl nucleotide
  modified_base 38: mod_base = OTHER; note = 2'-O-methyl nucleotide
  modified_base 39: mod_base = OTHER; note = 2'-O-methyl nucleotide
  modified_base 40: mod_base = OTHER; note = 2'-O-methyl nucleotide
  modified_base 69: mod_base = OTHER; note = 2'-O-methyl nucleotide
  modified_base 70: mod_base = OTHER; note = 2'-O-methyl nucleotide
  modified_base 71: mod_base = OTHER; note = 2'-O-methyl nucleotide
  modified_base 72: mod_base = OTHER; note = 2'-O-methyl nucleotide
  modified_base 73: mod_base = OTHER; note = 2'-O-methyl nucleotide
  modified_base 74: mod_base = OTHER; note = 2'-O-methyl nucleotide
  modified_base 75: mod_base = OTHER; note = 2'-O-methyl nucleotide
  modified_base 76: mod_base = OTHER; note = 2'-O-methyl nucleotide
  modified_base 77: mod_base = OTHER; note = 2'-O-methyl nucleotide
  modified_base 78: mod_base = OTHER; note = 2'-O-methyl nucleotide
  modified_base 79: mod_base = OTHER; note = 2'-O-methyl nucleotide
  modified_base 80: mod_base = OTHER; note = 2'-O-methyl nucleotide
  modified_base 81: mod_base = OTHER; note = 2'-O-methyl nucleotide
  modified_base 82: mod_base = OTHER; note = 2'-O-methyl nucleotide
  modified_base 83: mod_base = OTHER; note = 2'-O-methyl nucleotide
  modified_base 84: mod_base = OTHER; note = 2'-O-methyl nucleotide
  modified_base 85: mod_base = OTHER; note = 2'-O-methyl nucleotide
  modified_base 86: mod_base = OTHER; note = 2'-O-methyl nucleotide
  modified_base 87: mod_base = OTHER; note = 2'-O-methyl nucleotide
  modified_base 88: mod_base = OTHER; note = 2'-O-methyl nucleotide
  modified_base 89: mod_base = OTHER; note = 2'-O-methyl nucleotide
  modified_base 90: mod_base = OTHER; note = 2'-O-methyl nucleotide
  modified_base 91: mod_base = OTHER; note = 2'-O-methyl nucleotide
  modified_base 92: mod_base = OTHER; note = 2'-O-methyl nucleotide
  modified_base 93: mod_base = OTHER; note = 2'-O-methyl nucleotide
  modified_base 94: mod_base = OTHER; note = 2'-O-methyl nucleotide
  modified_base 95: mod_base = OTHER; note = 2'-O-methyl nucleotide
  modified_base 96: mod_base = OTHER; note = 2'-O-methyl nucleotide
  modified_base 97: mod_base = OTHER; note = 2'-O-methyl nucleotide, phosphorothioate linkage
  modified_base 98: mod_base = OTHER; note = 2'-O-methyl nucleotide, phosphorothioate linkage
  modified_base 99: mod_base = OTHER; note = 2'-O-methyl nucleotide, phosphorothioate linkage
  modified_base 100: mod_base = OTHER; note = 2'-O-methyl nucleotide
  source 1..100: mol_type = other RNA

SEQ ID NO: 463 - RNA, 100 nt, synthetic construct; identical to SEQ ID NO: 433
  misc_feature 1..100: note = Synthetic
  modified_base 1: mod_base = OTHER; note = 2'-O-methyl nucleotide, phosphorothioate linkage
  modified_base 2: mod_base = OTHER; note = 2'-O-methyl nucleotide, phosphorothioate linkage
  modified_base 3: mod_base = OTHER; note = 2'-O-methyl nucleotide, phosphorothioate linkage
  modified_base 29: mod_base = OTHER; note = 2'-O-methyl nucleotide
  modified_base 30: mod_base = OTHER; note = 2'-O-methyl nucleotide
  modified_base 31: mod_base = OTHER; note = 2'-O-methyl nucleotide
  modified_base 32: mod_base = OTHER; note = 2'-O-methyl nucleotide
  modified_base 33: mod_base = OTHER; note = 2'-O-methyl nucleotide
  modified_base 34: mod_base = OTHER; note = 2'-O-methyl nucleotide
  modified_base 35: mod_base = OTHER; note = 2'-O-methyl nucleotide
  modified_base 36: mod_base = OTHER; note = 2'-O-methyl nucleotide
  modified_base 37: mod_base = OTHER; note = 2'-O-methyl nucleotide
  modified_base 38: mod_base = OTHER; note = 2'-O-methyl nucleotide
  modified_base 39: mod_base = OTHER; note = 2'-O-methyl nucleotide
  modified_base 40: mod_base = OTHER; note = 2'-O-methyl nucleotide
  modified_base 69: mod_base = OTHER; note = 2'-O-methyl nucleotide
  modified_base 70: mod_base = OTHER; note = 2'-O-methyl nucleotide
  modified_base 71: mod_base = OTHER; note = 2'-O-methyl nucleotide
  modified_base 72: mod_base = OTHER; note = 2'-O-methyl nucleotide
  modified_base 73: mod_base = OTHER; note = 2'-O-methyl nucleotide
  modified_base 74: mod_base = OTHER; note = 2'-O-methyl nucleotide
  modified_base 75: mod_base = OTHER; note = 2'-O-methyl nucleotide
  modified_base 76: mod_base = OTHER; note = 2'-O-methyl nucleotide
  modified_base 77: mod_base = OTHER; note = 2'-O-methyl nucleotide
  modified_base 78: mod_base = OTHER; note = 2'-O-methyl nucleotide
  modified_base 79: mod_base = OTHER; note = 2'-O-methyl nucleotide
  modified_base 80: mod_base = OTHER; note = 2'-O-methyl nucleotide
  modified_base 81: mod_base = OTHER; note = 2'-O-methyl nucleotide
  modified_base 82: mod_base = OTHER; note = 2'-O-methyl nucleotide
  modified_base 83: mod_base = OTHER; note = 2'-O-methyl nucleotide
  modified_base 84: mod_base = OTHER; note = 2'-O-methyl nucleotide
  modified_base 85: mod_base = OTHER; note = 2'-O-methyl nucleotide
  modified_base 86: mod_base = OTHER; note = 2'-O-methyl nucleotide
  modified_base 87: mod_base = OTHER; note = 2'-O-methyl nucleotide
  modified_base 88: mod_base = OTHER; note = 2'-O-methyl nucleotide
  modified_base 89: mod_base = OTHER; note = 2'-O-methyl nucleotide
  modified_base 90: mod_base = OTHER; note = 2'-O-methyl nucleotide
  modified_base 91: mod_base = OTHER; note = 2'-O-methyl nucleotide
  modified_base 92: mod_base = OTHER; note = 2'-O-methyl nucleotide
  modified_base 93: mod_base = OTHER; note = 2'-O-methyl nucleotide
  modified_base 94: mod_base = OTHER; note = 2'-O-methyl nucleotide
  modified_base 95: mod_base = OTHER; note = 2'-O-methyl nucleotide
  modified_base 96: mod_base = OTHER; note = 2'-O-methyl nucleotide
  modified_base 97: mod_base = OTHER; note = 2'-O-methyl nucleotide, phosphorothioate linkage
  modified_base 98: mod_base = OTHER; note = 2'-O-methyl nucleotide, phosphorothioate linkage
  modified_base 99: mod_base = OTHER; note = 2'-O-methyl nucleotide, phosphorothioate linkage
  modified_base 100: mod_base = OTHER; note = 2'-O-methyl nucleotide
  source 1..100: mol_type = other RNA

SEQ ID NO: 464 - RNA, 91 nt, synthetic construct; identical to SEQ ID NO: 434
  misc_feature 1..91: note = Synthetic
  modified_base 1: mod_base = OTHER; note = 2'-O-methyl nucleotide, phosphorothioate linkage
  modified_base 2: mod_base = OTHER; note = 2'-O-methyl nucleotide, phosphorothioate linkage
  modified_base 3: mod_base = OTHER; note = 2'-O-methyl nucleotide, phosphorothioate linkage
  modified_base 29: mod_base = OTHER; note = 2'-O-methyl nucleotide
  modified_base 30: mod_base = OTHER; note = 2'-O-methyl nucleotide
  modified_base 31: mod_base = OTHER; note = 2'-O-methyl nucleotide
  modified_base 32: mod_base = OTHER; note = 2'-O-methyl nucleotide
  modified_base 33: mod_base = OTHER; note = 2'-O-methyl nucleotide
  modified_base 34: mod_base = OTHER; note = 2'-O-methyl nucleotide
  modified_base 35: mod_base = OTHER; note = 2'-O-methyl nucleotide
  modified_base 36: mod_base = OTHER; note = 2'-O-methyl nucleotide
  modified_base 37: mod_base = OTHER; note = 2'-O-methyl nucleotide
  modified_base 38: mod_base = OTHER; note = 2'-O-methyl nucleotide
  modified_base 39: mod_base = OTHER; note = 2'-O-methyl nucleotide
  modified_base 40: mod_base = OTHER; note = 2'-O-methyl nucleotide
  modified_base 88: mod_base = OTHER; note = 2'-O-methyl nucleotide, phosphorothioate linkage
  modified_base 89: mod_base = OTHER; note = 2'-O-methyl nucleotide, phosphorothioate linkage
  modified_base 90: mod_base = OTHER; note = 2'-O-methyl nucleotide, phosphorothioate linkage
  modified_base 91: mod_base = OTHER; note = 2'-O-methyl nucleotide
  source 1..91: mol_type = other RNA

SEQ ID NO: 465-598 - skipped (134 entries)

SEQ ID NO: 599 - RNA, 22 nt, synthetic construct
  misc_feature 1..22: note = Synthetic
  source 1..22: mol_type = other RNA
gttttagagctatgctgttttg

SEQ ID NO: 600 - RNA, 80 nt, synthetic construct
  misc_feature 1..80: note = Synthetic
  source 1..80: mol_type = other RNA
gttttagagctagaaatagcaagttaaaataaggctagtccgttatcaacttgaaaaagtggcaccgagtcggtgctttt

SEQ ID NO: 601 - RNA, 76 nt, synthetic construct
  misc_feature 1..76: note = Synthetic
  source 1..76: mol_type = other RNA
gttttagagctagaaatagcaagttaaaataaggctagtccgttatcaacttgaaaaagtggcaccgagtcggtgc

SEQ ID NO: 602 - RNA, 77 nt, synthetic construct
  misc_feature 1..77: note = Synthetic
  source 1..77: mol_type = other RNA
gttttagagctagaaatagcaagttaaaataaggctagtccgttatcaacttgaaaaagtggcaccgagtcggtgct

SEQ ID NO: 603 - RNA, 68 nt, synthetic construct
  misc_feature 1..68: note = Synthetic
  source 1..68: mol_type = other RNA
gttttagagctagaaatagcaagttaaaataaggctagtccgttatcaacttggcaccgagtcggtgc

SEQ ID NO: 604 - RNA, 68 nt, synthetic construct
  misc_feature 1..68: note = Synthetic
  source 1..68: mol_type = other RNA
gttttagagctagaaatagcaagttaaaataaggctagtccgttatcaaaatggcaccgagtcggtgc

SEQ ID NO: 605 - RNA, 69 nt, synthetic construct
  misc_feature 1..69: note = Synthetic
  source 1..69: mol_type = other RNA
ggttttagagctagaaatagcaagttaaaataaggctagtccgttatcaaaatggcaccgagtcggtgc

SEQ ID NO: 606 - RNA, 70 nt, synthetic construct
  misc_feature 1..70: note = Synthetic
  source 1..70: mol_type = other RNA
gttttagagctagaaatagcaagttaaaataaggctagtccgttatcacgaaagggcaccgagtcggtgc

SEQ ID NO: 607 - RNA, 71 nt, synthetic construct
  misc_feature 1..71: note = Synthetic
  source 1..71: mol_type = other RNA
gttttagagctagaaatagcaagttaaaataaggctagtccgttatcacgaaagggcaccgagtcggtgct

SEQ ID NO: 608-609 - skipped (2 entries)

SEQ ID NO: 610 - RNA, 100 nt, synthetic construct
  misc_feature 1..100: note = Synthetic
  variation 1..20: note = n is a, c, g, or u
  source 1..100: mol_type = other RNA
nnnnnnnnnnnnnnnnnnnngttttagagctagaaatagcaagttaaaataaggctagtccgttatcaacttgaaaaagtggcaccgagtcggtgctttt

SEQ ID NO: 611 - RNA, 96 nt, synthetic construct
  misc_feature 1..96: note = Synthetic
  variation 1..20: note = n is a, c, g, or u
  source 1..96: mol_type = other RNA
nnnnnnnnnnnnnnnnnnnngttttagagctagaaatagcaagttaaaataaggctagtccgttatcaacttgaaaaagtggcaccgagtcggtgc

SEQ ID NO: 612 - RNA, 97 nt, synthetic construct
  misc_feature 1..97: note = Synthetic
  variation 1..20: note = n is a, c, g, or u
  source 1..97: mol_type = other RNA
nnnnnnnnnnnnnnnnnnnngttttagagctagaaatagcaagttaaaataaggctagtccgttatcaacttgaaaaagtggcaccgagtcggtgct

SEQ ID NO: 613 - RNA, 88 nt, synthetic construct
  misc_feature 1..88: note = Synthetic
  variation 1..20: note = n is a, c, g, or u
  source 1..88: mol_type = other RNA
nnnnnnnnnnnnnnnnnnnngttttagagctagaaatagcaagttaaaataaggctagtccgttatcaacttggcaccgagtcggtgc

SEQ ID NO: 614 - RNA, 88 nt, synthetic construct
  misc_feature 1..88: note = Synthetic
  variation 1..20: note = n is a, c, g, or u
  source 1..88: mol_type = other RNA
nnnnnnnnnnnnnnnnnnnngttttagagctagaaatagcaagttaaaataaggctagtccgttatcaaaatggcaccgagtcggtgc

SEQ ID NO: 615 - RNA, 89 nt, synthetic construct
  misc_feature 1..89: note = Synthetic
  variation 1..20: note = n is a, c, g, or u
  source 1..89: mol_type = other RNA
nnnnnnnnnnnnnnnnnnnnggttttagagctagaaatagcaagttaaaataaggctagtccgttatcaaaatggcaccgagtcggtgc

SEQ ID NO: 616 - RNA, 90 nt, synthetic construct
  misc_feature 1..90: note = Synthetic
  variation 1..20: note = n is a, c, g, or u
  source 1..90: mol_type = other RNA
nnnnnnnnnnnnnnnnnnnngttttagagctagaaatagcaagttaaaataaggctagtccgttatcacgaaagggcaccgagtcggtgc

SEQ ID NO: 617 - RNA, 91 nt, synthetic construct
  misc_feature 1..91: note = Synthetic
  variation 1..20: note = n is a, c, g, or u
  source 1..91: mol_type = other RNA
nnnnnnnnnnnnnnnnnnnngttttagagctagaaatagcaagttaaaataaggctagtccgttatcacgaaagggcaccgagtcggtgct

SEQ ID NO: 618-619 - skipped (2 entries)

SEQ ID NO: 620 - RNA, 80 nt, synthetic construct; identical to SEQ ID NO: 600
  misc_feature 1..80: note = Synthetic
  modified_base 9: mod_base = OTHER; note = 2'-O-methyl nucleotide
  modified_base 10: mod_base = OTHER; note = 2'-O-methyl nucleotide
  modified_base 11: mod_base = OTHER; note = 2'-O-methyl nucleotide
  modified_base 12: mod_base = OTHER; note = 2'-O-methyl nucleotide
  modified_base 13: mod_base = OTHER; note = 2'-O-methyl nucleotide
  modified_base 14: mod_base = OTHER; note = 2'-O-methyl nucleotide
  modified_base 15: mod_base = OTHER; note = 2'-O-methyl nucleotide
  modified_base 16: mod_base = OTHER; note = 2'-O-methyl nucleotide
  modified_base 17: mod_base = OTHER; note = 2'-O-methyl nucleotide
  modified_base 18: mod_base = OTHER; note = 2'-O-methyl nucleotide
  modified_base 19: mod_base = OTHER; note = 2'-O-methyl nucleotide
  modified_base 20: mod_base = OTHER; note = 2'-O-methyl nucleotide
  modified_base 49: mod_base = OTHER; note = 2'-O-methyl nucleotide
  modified_base 50: mod_base = OTHER; note = 2'-O-methyl nucleotide
  modified_base 51: mod_base = OTHER; note = 2'-O-methyl nucleotide
  modified_base 52: mod_base = OTHER; note = 2'-O-methyl nucleotide
  modified_base 53: mod_base = OTHER; note = 2'-O-methyl nucleotide
  modified_base 54: mod_base = OTHER; note = 2'-O-methyl nucleotide
  modified_base 55: mod_base = OTHER; note = 2'-O-methyl nucleotide
  modified_base 56: mod_base = OTHER; note = 2'-O-methyl nucleotide
  modified_base 57: mod_base = OTHER; note = 2'-O-methyl nucleotide
  modified_base 58: mod_base = OTHER; note = 2'-O-methyl nucleotide
  modified_base 59: mod_base = OTHER; note = 2'-O-methyl nucleotide
  modified_base 60: mod_base = OTHER; note = 2'-O-methyl nucleotide
  modified_base 61: mod_base = OTHER; note = 2'-O-methyl nucleotide
  modified_base 62: mod_base = OTHER; note = 2'-O-methyl nucleotide
  modified_base 63: mod_base = OTHER; note = 2'-O-methyl nucleotide
  modified_base 64: mod_base = OTHER; note = 2'-O-methyl nucleotide
  modified_base 65: mod_base = OTHER; note = 2'-O-methyl nucleotide
  modified_base 66: mod_base = OTHER; note = 2'-O-methyl nucleotide
  modified_base 67: mod_base = OTHER; note = 2'-O-methyl nucleotide
  modified_base 68: mod_base = OTHER; note = 2'-O-methyl nucleotide
  modified_base 69: mod_base = OTHER; note = 2'-O-methyl nucleotide
  modified_base 70: mod_base = OTHER; note = 2'-O-methyl nucleotide
  modified_base 71: mod_base = OTHER; note = 2'-O-methyl nucleotide
  modified_base 72: mod_base = OTHER; note = 2'-O-methyl nucleotide
  modified_base 73: mod_base = OTHER; note = 2'-O-methyl nucleotide
  modified_base 74: mod_base = OTHER; note = 2'-O-methyl nucleotide
  modified_base 75: mod_base = OTHER; note = 2'-O-methyl nucleotide
  modified_base 76: mod_base = OTHER; note = 2'-O-methyl nucleotide
  modified_base 77: mod_base = OTHER; note = 2'-O-methyl nucleotide, phosphorothioate linkage
  modified_base 78: mod_base = OTHER; note = 2'-O-methyl nucleotide, phosphorothioate linkage
  modified_base 79: mod_base = OTHER; note = 2'-O-methyl nucleotide, phosphorothioate linkage
  modified_base 80: mod_base = OTHER; note = 2'-O-methyl nucleotide
  source 1..80: mol_type = other RNA

SEQ ID NO: 621-629 - skipped (9 entries)

SEQ ID NO: 630 - RNA, 76 nt, synthetic construct; identical to SEQ ID NO: 601
  misc_feature 1..76: note = Synthetic
  modified_base 9: mod_base = OTHER; note = 2'-O-methyl nucleotide
  modified_base 10: mod_base = OTHER; note = 2'-O-methyl nucleotide
  modified_base 11: mod_base = OTHER; note = 2'-O-methyl nucleotide
  modified_base 12: mod_base = OTHER; note = 2'-O-methyl nucleotide
  modified_base 13: mod_base = OTHER; note = 2'-O-methyl nucleotide
  modified_base 14: mod_base = OTHER; note = 2'-O-methyl nucleotide
  modified_base 15: mod_base = OTHER; note = 2'-O-methyl nucleotide
  modified_base 16: mod_base = OTHER; note = 2'-O-methyl nucleotide
  modified_base 17: mod_base = OTHER; note = 2'-O-methyl nucleotide
  modified_base 18: mod_base = OTHER; note = 2'-O-methyl nucleotide
  modified_base 19: mod_base = OTHER; note = 2'-O-methyl nucleotide
  modified_base 20: mod_base = OTHER; note = 2'-O-methyl nucleotide
  modified_base 49: mod_base = OTHER; note = 2'-O-methyl nucleotide
  modified_base 50: mod_base = OTHER; note = 2'-O-methyl nucleotide
  modified_base 51: mod_base = OTHER; note = 2'-O-methyl nucleotide
  modified_base 52: mod_base = OTHER; note = 2'-O-methyl nucleotide
  modified_base 53: mod_base = OTHER; note = 2'-O-methyl nucleotide
  modified_base 54: mod_base = OTHER; note = 2'-O-methyl nucleotide
  modified_base 55: mod_base = OTHER; note = 2'-O-methyl nucleotide
  modified_base 56: mod_base = OTHER; note = 2'-O-methyl nucleotide
  modified_base 57: mod_base = OTHER; note = 2'-O-methyl nucleotide
  modified_base 58: mod_base = OTHER; note = 2'-O-methyl nucleotide
  modified_base 59: mod_base = OTHER; note = 2'-O-methyl nucleotide
  modified_base 60: mod_base = OTHER; note = 2'-O-methyl nucleotide
  modified_base 61: mod_base = OTHER; note = 2'-O-methyl nucleotide
  modified_base 62: mod_base = OTHER; note = 2'-O-methyl nucleotide
  modified_base 63: mod_base = OTHER; note = 2'-O-methyl nucleotide
  modified_base 64: mod_base = OTHER; note = 2'-O-methyl nucleotide
  modified_base 65: mod_base = OTHER; note = 2'-O-methyl nucleotide
  modified_base 66: mod_base = OTHER; note = 2'-O-methyl nucleotide
  modified_base 67: mod_base = OTHER; note = 2'-O-methyl nucleotide
  modified_base 68: mod_base = OTHER; note = 2'-O-methyl nucleotide
  modified_base 69: mod_base = OTHER; note = 2'-O-methyl nucleotide
  modified_base 70: mod_base = OTHER; note = 2'-O-methyl nucleotide
  modified_base 71: mod_base = OTHER; note = 2'-O-methyl nucleotide
  modified_base 72: mod_base = OTHER; note = 2'-O-methyl nucleotide
  modified_base 73: mod_base = OTHER; note = 2'-O-methyl nucleotide
  modified_base 74: mod_base = OTHER; note = 2'-O-methyl nucleotide
  modified_base 75: mod_base = OTHER; note = 2'-O-methyl nucleotide
  modified_base 76: mod_base = OTHER; note = 2'-O-methyl nucleotide
  source 1..76: mol_type = other RNA

SEQ ID NO: 631 - RNA, 77 nt, synthetic construct; identical to SEQ ID NO: 602
  misc_feature 1..77: note = Synthetic
  modified_base 9: mod_base = OTHER; note = 2'-O-methyl nucleotide
  modified_base 10: mod_base = OTHER; note = 2'-O-methyl nucleotide
  modified_base 11: mod_base = OTHER; note = 2'-O-methyl nucleotide
  modified_base 12: mod_base = OTHER; note = 2'-O-methyl nucleotide
  modified_base 13: mod_base = OTHER; note = 2'-O-methyl nucleotide
  modified_base 14: mod_base = OTHER; note = 2'-O-methyl nucleotide
  modified_base 15: mod_base = OTHER; note = 2'-O-methyl nucleotide
  modified_base 16: mod_base = OTHER; note = 2'-O-methyl nucleotide
  modified_base 17: mod_base = OTHER; note = 2'-O-methyl nucleotide
  modified_base 18: mod_base = OTHER; note = 2'-O-methyl nucleotide
  modified_base 19: mod_base = OTHER; note = 2'-O-methyl nucleotide
  modified_base 20: mod_base = OTHER; note = 2'-O-methyl nucleotide
  modified_base 49: mod_base = OTHER; note = 2'-O-methyl nucleotide
  modified_base 50: mod_base = OTHER; note = 2'-O-methyl nucleotide
  modified_base 51: mod_base = OTHER; note = 2'-O-methyl nucleotide
  modified_base 52: mod_base = OTHER; note = 2'-O-methyl nucleotide
  modified_base 53: mod_base = OTHER; note = 2'-O-methyl nucleotide
  modified_base 54: mod_base = OTHER; note = 2'-O-methyl nucleotide
  modified_base 55: mod_base = OTHER; note = 2'-O-methyl nucleotide
  modified_base 56: mod_base = OTHER; note = 2'-O-methyl nucleotide
  modified_base 57: mod_base = OTHER; note = 2'-O-methyl nucleotide
  modified_base 58: mod_base = OTHER; note = 2'-O-methyl nucleotide
  modified_base 59: mod_base = OTHER; note = 2'-O-methyl nucleotide
  modified_base 60: mod_base = OTHER; note = 2'-O-methyl nucleotide
  modified_base 61: mod_base = OTHER; note = 2'-O-methyl nucleotide
  modified_base 62: mod_base = OTHER; note = 2'-O-methyl nucleotide
  modified_base 63: mod_base = OTHER; note = 2'-O-methyl nucleotide
  modified_base 64: mod_base = OTHER; note = 2'-O-methyl nucleotide
  modified_base 65: mod_base = OTHER; note = 2'-O-methyl nucleotide
  modified_base 66: mod_base = OTHER; note = 2'-O-methyl nucleotide
  modified_base 67: mod_base = OTHER; note = 2'-O-methyl nucleotide
  modified_base 68: mod_base = OTHER; note = 2'-O-methyl nucleotide
  modified_base 69: mod_base = OTHER; note = 2'-O-methyl nucleotide
  modified_base 70: mod_base = OTHER; note = 2'-O-methyl nucleotide
  modified_base 71: mod_base = OTHER; note = 2'-O-methyl nucleotide
  modified_base 72: mod_base = OTHER; note = 2'-O-methyl nucleotide
  modified_base 73: mod_base = OTHER; note = 2'-O-methyl nucleotide
  modified_base 74: mod_base = OTHER; note = 2'-O-methyl nucleotide
  modified_base 75: mod_base = OTHER; note = 2'-O-methyl nucleotide
  modified_base 76: mod_base = OTHER; note = 2'-O-methyl nucleotide
  modified_base 77: mod_base = OTHER; note = 2'-O-methyl nucleotide
  source 1..77: mol_type = other RNA

SEQ ID NO: 632 - RNA, 68 nt, synthetic construct; identical to SEQ ID NO: 603
  misc_feature 1..68: note = Synthetic
  modified_base 9: mod_base = OTHER; note = 2'-O-methyl nucleotide
  modified_base 10: mod_base = OTHER; note = 2'-O-methyl nucleotide
  modified_base 11: mod_base = OTHER; note = 2'-O-methyl nucleotide
  modified_base 12: mod_base = OTHER; note = 2'-O-methyl nucleotide
  modified_base 13: mod_base = OTHER; note = 2'-O-methyl nucleotide
  modified_base 14: mod_base = OTHER; note = 2'-O-methyl nucleotide
  modified_base 15: mod_base = OTHER; note = 2'-O-methyl nucleotide
  modified_base 16: mod_base = OTHER; note = 2'-O-methyl nucleotide
  modified_base 17: mod_base = OTHER; note = 2'-O-methyl nucleotide
  modified_base 18: mod_base = OTHER; note = 2'-O-methyl nucleotide
  modified_base 19: mod_base = OTHER; note = 2'-O-methyl nucleotide
  modified_base 20: mod_base = OTHER; note = 2'-O-methyl nucleotide
  modified_base 65: mod_base = OTHER; note = phosphorothioate linkage
  modified_base 66: mod_base = OTHER; note = 2'-O-methyl nucleotide, phosphorothioate linkage
  modified_base 67: mod_base = OTHER; note = 2'-O-methyl nucleotide, phosphorothioate linkage
  modified_base 68: mod_base = OTHER; note = 2'-O-methyl nucleotide
  source 1..68: mol_type = other RNA

SEQ ID NO: 633 - skipped

SEQ ID NO: 634 - RNA, 68 nt, synthetic construct; identical to SEQ ID NO: 604
  misc_feature 1..68: note = Synthetic
  modified_base 9: mod_base = OTHER; note = 2'-O-methyl nucleotide
  modified_base 10: mod_base = OTHER; note = 2'-O-methyl nucleotide
  modified_base 11: mod_base = OTHER; note = 2'-O-methyl nucleotide
  modified_base 12: mod_base = OTHER; note = 2'-O-methyl nucleotide
  modified_base 13: mod_base = OTHER; note = 2'-O-methyl nucleotide
  modified_base 14: mod_base = OTHER; note = 2'-O-methyl nucleotide
  modified_base 15: mod_base = OTHER; note = 2'-O-methyl nucleotide
  modified_base 16: mod_base = OTHER; note = 2'-O-methyl nucleotide
  modified_base 17: mod_base = OTHER; note = 2'-O-methyl nucleotide
  modified_base 18: mod_base = OTHER; note = 2'-O-methyl nucleotide
  modified_base 19: mod_base = OTHER; note = 2'-O-methyl nucleotide
  modified_base 20: mod_base = OTHER; note = 2'-O-methyl nucleotide
  modified_base 65: mod_base = OTHER; note = phosphorothioate linkage
  modified_base 66: mod_base = OTHER; note = 2'-O-methyl nucleotide, phosphorothioate linkage
  modified_base 67: mod_base = OTHER; note = 2'-O-methyl nucleotide, phosphorothioate linkage
  modified_base 68: mod_base = OTHER; note = 2'-O-methyl nucleotide
  source 1..68: mol_type = other RNA

SEQ ID NO: 635 - RNA, 68 nt, synthetic construct; identical to SEQ ID NO: 604
  misc_feature 1..68: note = Synthetic
  modified_base 9: mod_base = OTHER; note = 2'-O-methyl nucleotide
  modified_base 10: mod_base = OTHER; note = 2'-O-methyl nucleotide
  modified_base 11: mod_base = OTHER; note = 2'-O-methyl nucleotide
  modified_base 12: mod_base = OTHER; note = 2'-O-methyl nucleotide
  modified_base 13: mod_base = OTHER; note = 2'-O-methyl nucleotide
  modified_base 14: mod_base = OTHER; note = 2'-O-methyl nucleotide
  modified_base 15: mod_base = OTHER; note = 2'-O-methyl nucleotide
  modified_base 16: mod_base = OTHER; note = 2'-O-methyl nucleotide
  modified_base 17: mod_base = OTHER; note = 2'-O-methyl nucleotide
  modified_base 18: mod_base = OTHER; note = 2'-O-methyl nucleotide
  modified_base 19: mod_base = OTHER; note = 2'-O-methyl nucleotide
  modified_base 20: mod_base = OTHER; note = 2'-O-methyl nucleotide
  modified_base 49: mod_base = OTHER; note = 2'-O-methyl nucleotide
  modified_base 50: mod_base = OTHER; note = 2'-O-methyl nucleotide
  modified_base 51: mod_base = OTHER; note = 2'-O-methyl nucleotide
  modified_base 52: mod_base = OTHER; note = 2'-O-methyl nucleotide
  modified_base 53: mod_base = OTHER; note = 2'-O-methyl nucleotide
  modified_base 54: mod_base = OTHER; note = 2'-O-methyl nucleotide
  modified_base 55: mod_base = OTHER; note = 2'-O-methyl nucleotide
  modified_base 56: mod_base = OTHER; note = 2'-O-methyl nucleotide
  modified_base 57: mod_base = OTHER; note = 2'-O-methyl nucleotide
  modified_base 58: mod_base = OTHER; note = 2'-O-methyl nucleotide
  modified_base 59: mod_base = OTHER; note = 2'-O-methyl nucleotide
  modified_base 60: mod_base = OTHER; note = 2'-O-methyl nucleotide
  modified_base 61: mod_base = OTHER; note = 2'-O-methyl nucleotide
  modified_base 62: mod_base = OTHER; note = 2'-O-methyl nucleotide
  modified_base 63: mod_base = OTHER; note = 2'-O-methyl nucleotide
  modified_base 64: mod_base = OTHER; note = 2'-O-methyl nucleotide
  modified_base 65: mod_base = OTHER; note = 2'-O-methyl nucleotide, phosphorothioate linkage
  modified_base 66: mod_base = OTHER; note = 2'-O-methyl nucleotide, phosphorothioate linkage
  modified_base 67: mod_base = OTHER; note = 2'-O-methyl nucleotide, phosphorothioate linkage
  modified_base 68: mod_base = OTHER; note = 2'-O-methyl nucleotide
  source 1..68: mol_type = other RNA

SEQ ID NO: 636 - RNA, 70 nt, synthetic construct; identical to SEQ ID NO: 606
  misc_feature 1..70: note = Synthetic
  modified_base 9: mod_base = OTHER; note = 2'-O-methyl nucleotide
  modified_base 10: mod_base = OTHER; note = 2'-O-methyl nucleotide
  modified_base 11: mod_base = OTHER; note = 2'-O-methyl nucleotide
  modified_base 12: mod_base = OTHER; note = 2'-O-methyl nucleotide
  modified_base 13: mod_base = OTHER; note = 2'-O-methyl nucleotide
  modified_base 14: mod_base = OTHER; note = 2'-O-methyl nucleotide
  modified_base 15: mod_base = OTHER; note = 2'-O-methyl nucleotide
  modified_base 16: mod_base = OTHER; note = 2'-O-methyl nucleotide
  modified_base 17: mod_base = OTHER; note = 2'-O-methyl nucleotide
  modified_base 18: mod_base = OTHER; note = 2'-O-methyl nucleotide
  modified_base 19: mod_base = OTHER; note = 2'-O-methyl nucleotide
  modified_base 20: mod_base = OTHER; note = 2'-O-methyl nucleotide
  modified_base 67: mod_base = OTHER; note = 2'-O-methyl nucleotide, phosphorothioate linkage
  modified_base 68: mod_base = OTHER; note = 2'-O-methyl nucleotide, phosphorothioate linkage
  modified_base 69: mod_base = OTHER; note = 2'-O-methyl nucleotide, phosphorothioate linkage
  modified_base 70: mod_base = OTHER; note = 2'-O-methyl nucleotide
  source 1..70: mol_type = other RNA

SEQ ID NO: 637 - RNA, 70 nt, synthetic construct; identical to SEQ ID NO: 606
  misc_feature 1..70: note = Synthetic
  modified_base 9: mod_base = OTHER; note = 2'-O-methyl nucleotide
  modified_base 10: mod_base = OTHER; note = 2'-O-methyl nucleotide
  modified_base 11: mod_base = OTHER; note = 2'-O-methyl nucleotide
  modified_base 12: mod_base = OTHER; note = 2'-O-methyl nucleotide
  modified_base 13: mod_base = OTHER; note = 2'-O-methyl nucleotide
  modified_base 14: mod_base = OTHER; note = 2'-O-methyl nucleotide
  modified_base 15: mod_base = OTHER; note = 2'-O-methyl nucleotide
  modified_base 16: mod_base = OTHER; note = 2'-O-methyl nucleotide
  modified_base 17: mod_base = OTHER; note = 2'-O-methyl nucleotide
  modified_base 18: mod_base = OTHER; note = 2'-O-methyl nucleotide
  modified_base 19: mod_base = OTHER; note = 2'-O-methyl nucleotide
  modified_base 20: mod_base = OTHER; note = 2'-O-methyl nucleotide
  modified_base 49: mod_base = OTHER; note = 2'-O-methyl nucleotide
  modified_base 50: mod_base = OTHER; note = 2'-O-methyl nucleotide
  modified_base 51: mod_base = OTHER; note = 2'-O-methyl nucleotide
  modified_base 52: mod_base = OTHER; note = 2'-O-methyl nucleotide
  modified_base 53: mod_base = OTHER; note = 2'-O-methyl nucleotide
  modified_base 54: mod_base = OTHER; note = 2'-O-methyl nucleotide
  modified_base 55: mod_base = OTHER; note = 2'-O-methyl nucleotide
  modified_base 56: mod_base = OTHER; note = 2'-O-methyl nucleotide
  modified_base 57: mod_base = OTHER; note = 2'-O-methyl nucleotide
  modified_base 58: mod_base = OTHER; note = 2'-O-methyl nucleotide
  modified_base 59: mod_base = OTHER; note = 2'-O-methyl nucleotide
  modified_base 60: mod_base = OTHER; note = 2'-O-methyl nucleotide
  modified_base 61: mod_base = OTHER; note = 2'-O-methyl nucleotide
  modified_base 62: mod_base = OTHER; note = 2'-O-methyl nucleotide
  modified_base 63: mod_base = OTHER; note = 2'-O-methyl nucleotide
  modified_base 64: mod_base = OTHER; note = 2'-O-methyl nucleotide
  modified_base 65: mod_base = OTHER; note = 2'-O-methyl nucleotide
  modified_base 66: mod_base = OTHER; note = 2'-O-methyl nucleotide
  modified_base 67: mod_base = OTHER; note = 2'-O-methyl nucleotide, phosphorothioate linkage
  modified_base 68: mod_base = OTHER; note = 2'-O-methyl nucleotide, phosphorothioate linkage
  modified_base 69: mod_base = OTHER; note = 2'-O-methyl nucleotide, phosphorothioate linkage
  modified_base 70: mod_base = OTHER; note = 2'-O-methyl nucleotide
  source 1..70: mol_type = other RNA

SEQ ID NO: 638 - RNA, 71 nt, synthetic construct; identical to SEQ ID NO: 607
  misc_feature 1..71: note = Synthetic
  modified_base 9: mod_base = OTHER; note = 2'-O-methyl nucleotide
  modified_base 10: mod_base = OTHER; note = 2'-O-methyl nucleotide
  modified_base 11: mod_base = OTHER; note = 2'-O-methyl nucleotide
  modified_base 12: mod_base = OTHER; note = 2'-O-methyl nucleotide
  modified_base 13: mod_base = OTHER; note = 2'-O-methyl nucleotide
  modified_base 14: mod_base = OTHER; note = 2'-O-methyl nucleotide
  modified_base 15: mod_base = OTHER; note = 2'-O-methyl nucleotide
  modified_base 16: mod_base = OTHER; note = 2'-O-methyl nucleotide
  modified_base 17: mod_base = OTHER; note = 2'-O-methyl nucleotide
  modified_base 18: mod_base = OTHER; note = 2'-O-methyl nucleotide
  modified_base 19: mod_base = OTHER; note = 2'-O-methyl nucleotide
  modified_base 20: mod_base = OTHER; note = 2'-O-methyl nucleotide
  modified_base 68: mod_base = OTHER; note = phosphorothioate linkage
  modified_base 69: mod_base = OTHER; note = 2'-O-methyl nucleotide, phosphorothioate linkage
  modified_base 70: mod_base = OTHER; note = 2'-O-methyl nucleotide, phosphorothioate linkage
  modified_base 71: mod_base = OTHER; note = 2'-O-methyl nucleotide
  source 1..71: mol_type = other RNA

SEQ ID NO: 639 - RNA, 71 nt, synthetic construct; identical to SEQ ID NO: 607
  misc_feature 1..71: note = Synthetic
  modified_base 9: mod_base = OTHER; note = 2'-O-methyl nucleotide
  modified_base 10: mod_base = OTHER; note = 2'-O-methyl nucleotide
  modified_base 11: mod_base = OTHER; note = 2'-O-methyl nucleotide
  modified_base 12: mod_base = OTHER; note = 2'-O-methyl nucleotide
  modified_base 13: mod_base = OTHER; note = 2'-O-methyl nucleotide
  modified_base 14: mod_base = OTHER; note = 2'-O-methyl nucleotide
  modified_base 15: mod_base = OTHER; note = 2'-O-methyl nucleotide
  modified_base 16: mod_base = OTHER; note = 2'-O-methyl nucleotide
  modified_base 17: mod_base = OTHER; note = 2'-O-methyl nucleotide
  modified_base 18: mod_base = OTHER; note = 2'-O-methyl nucleotide
  modified_base 19: mod_base = OTHER; note = 2'-O-methyl nucleotide
  modified_base 20: mod_base = OTHER; note = 2'-O-methyl nucleotide
  modified_base 68: mod_base = OTHER; note = 2'-O-methyl nucleotide
  modified_base 69: mod_base = OTHER; note = 2'-O-methyl nucleotide
  modified_base 70: mod_base = OTHER; note = 2'-O-methyl nucleotide, phosphorothioate linkage
  modified_base 71: mod_base = OTHER; note = 2'-O-methyl nucleotide
  source 1..71: mol_type = other RNA

SEQ ID NO: 640 - RNA, 71 nt, synthetic construct; identical to SEQ ID NO: 607
  misc_feature 1..71: note = Synthetic
  modified_base 5: mod_base = OTHER; note = 2'-fluoro modification
  modified_base 8: mod_base = OTHER; note = 2'-O-methyl nucleotide
  modified_base 9: mod_base = OTHER; note = 2'-O-methyl nucleotide
  modified_base 10: mod_base = OTHER; note = 2'-O-methyl nucleotide
  modified_base 11: mod_base = OTHER; note = 2'-O-methyl nucleotide
  modified_base 12: mod_base = OTHER; note = 2'-O-methyl nucleotide
  modified_base 13: mod_base = OTHER; note = 2'-O-methyl nucleotide
  modified_base 14: mod_base = OTHER; note = 2'-O-methyl nucleotide
  modified_base 15: mod_base = OTHER; note = 2'-O-methyl nucleotide
  modified_base 16: mod_base = OTHER; note = 2'-O-methyl nucleotide
  modified_base 17: mod_base = OTHER; note = 2'-O-methyl nucleotide
  modified_base 18: mod_base = OTHER; note = 2'-O-methyl nucleotide
  modified_base 19: mod_base = OTHER; note = 2'-O-methyl nucleotide
  modified_base 20: mod_base = OTHER; note = 2'-O-methyl nucleotide
  modified_base 21: mod_base = OTHER; note = 2'-O-methyl nucleotide
  modified_base 22: mod_base = OTHER; note = 2'-O-methyl nucleotide
  modified_base 25: mod_base = OTHER; note = 2'-fluoro modification
  modified_base 26: mod_base = OTHER; note = 2'-O-methyl nucleotide
  modified_base 27: mod_base = OTHER; note = 2'-fluoro modification
  modified_base 28: mod_base = OTHER; note = 2'-O-methyl nucleotide
  modified_base 29: mod_base = OTHER; note = 2'-fluoro modification
  modified_base 30: mod_base = OTHER; note = 2'-O-methyl nucleotide
  modified_base 32: mod_base = OTHER; note = 2'-O-methyl nucleotide
  modified_base 33: mod_base = OTHER; note = 2'-O-methyl nucleotide
  modified_base 34: mod_base = OTHER; note = 2'-O-methyl nucleotide
  modified_base 35: mod_base = OTHER; note = 2'-O-methyl nucleotide
  modified_base 36: mod_base = OTHER; note = 2'-O-methyl nucleotide
  modified_base 37: mod_base = OTHER; note = 2'-O-methyl nucleotide
  modified_base 40: mod_base = OTHER; note = 2'-O-methyl nucleotide
  modified_base 41: mod_base = OTHER; note = 2'-O-methyl nucleotide
  modified_base 44: mod_base = OTHER; note = 2'-fluoro modification
  modified_base 46: mod_base = OTHER; note = 2'-O-methyl nucleotide
  modified_base 47: mod_base = OTHER; note = 2'-O-methyl nucleotide
  modified_base 49: mod_base = OTHER; note = 2'-O-methyl nucleotide
  modified_base 50: mod_base = OTHER; note = 2'-O-methyl nucleotide
  modified_base 51: mod_base = OTHER; note = 2'-O-methyl nucleotide
  modified_base 52: mod_base = OTHER; note = 2'-O-methyl nucleotide
  modified_base 53: mod_base = OTHER; note = 2'-O-methyl nucleotide
  modified_base 54: mod_base = OTHER; note = 2'-O-methyl nucleotide
  modified_base 55: mod_base = OTHER; note = 2'-O-methyl nucleotide
  modified_base 56: mod_base = OTHER; note = 2'-O-methyl nucleotide
  modified_base 57: mod_base = OTHER; note = 2'-O-methyl nucleotide
  modified_base 58: mod_base = OTHER; note = 2'-O-methyl nucleotide
  modified_base 59: mod_base = OTHER; note = 2'-O-methyl nucleotide
  modified_base 60: mod_base = OTHER; note = 2'-O-methyl nucleotide
  modified_base 61: mod_base = OTHER; note = 2'-O-methyl nucleotide
  modified_base 62: mod_base = OTHER; note = 2'-O-methyl nucleotide
  modified_base 63: mod_base = OTHER; note = 2'-O-methyl nucleotide
  modified_base 64: mod_base = OTHER; note = 2'-O-methyl nucleotide
  modified_base 65: mod_base = OTHER; note = 2'-O-methyl nucleotide
  modified_base 66: mod_base = OTHER; note = 2'-O-methyl nucleotide
  modified_base 67: mod_base = OTHER; note = 2'-O-methyl nucleotide
  modified_base 68: mod_base = OTHER; note = 2'-O-methyl nucleotide, phosphorothioate linkage
  modified_base 69: mod_base = OTHER; note = 2'-O-methyl nucleotide, phosphorothioate linkage
  modified_base 70: mod_base = OTHER; note = 2'-O-methyl nucleotide, phosphorothioate linkage
  modified_base 71: mod_base = OTHER; note = 2'-O-methyl nucleotide
  source 1..71: mol_type = other RNA

SEQ ID NO: 641 - RNA, 71 nt, synthetic construct; identical to SEQ ID NO: 607
  misc_feature 1..71: note = Synthetic
  modified_base 9: mod_base = OTHER; note = 2'-O-methyl nucleotide
  modified_base 10: mod_base = OTHER; note = 2'-O-methyl nucleotide
  modified_base 11: mod_base = OTHER; note = 2'-O-methyl nucleotide
  modified_base 12: mod_base = OTHER; note = 2'-O-methyl nucleotide
  modified_base 13: mod_base = OTHER; note = 2'-O-methyl nucleotide
  modified_base 14: mod_base = OTHER; note = 2'-O-methyl nucleotide
  modified_base 15: mod_base = OTHER; note = 2'-O-methyl nucleotide
  modified_base 16: mod_base = OTHER; note = 2'-O-methyl nucleotide
  modified_base 17: mod_base = OTHER; note = 2'-O-methyl nucleotide
  modified_base 18: mod_base = OTHER; note = 2'-O-methyl nucleotide
  modified_base 19: mod_base = OTHER; note = 2'-O-methyl nucleotide
  modified_base 20: mod_base = OTHER; note = 2'-O-methyl nucleotide
  modified_base 68: mod_base = OTHER; note = 2'-O-methyl nucleotide, phosphorothioate linkage
  modified_base 69: mod_base = OTHER; note = 2'-O-methyl nucleotide, phosphorothioate linkage
  modified_base 70: mod_base = OTHER; note = 2'-O-methyl nucleotide, phosphorothioate linkage
  modified_base 71: mod_base = OTHER; note = 2'-O-methyl nucleotide
  source 1..71: mol_type = other RNA

SEQ ID NO: 642-657 - skipped (16 entries)

SEQ ID NO: 658 - RNA, 100 nt, synthetic construct; identical to SEQ ID NO: 610
  misc_feature 1..100: note = Synthetic
  variation 1..20: note = n is a, c, g, or u
  modified_base 1: mod_base = OTHER; note = 2'-O-methyl nucleotide, phosphorothioate linkage
  modified_base 2: mod_base = OTHER; note = 2'-O-methyl nucleotide, phosphorothioate linkage
  modified_base 3: mod_base = OTHER; note = 2'-O-methyl nucleotide, phosphorothioate linkage
  modified_base 29: mod_base = OTHER; note = 2'-O-methyl nucleotide
  modified_base 30: mod_base = OTHER; note = 2'-O-methyl nucleotide
  modified_base 31: mod_base = OTHER; note = 2'-O-methyl nucleotide
  modified_base 32: mod_base = OTHER; note = 2'-O-methyl nucleotide
  modified_base 33: mod_base = OTHER; note = 2'-O-methyl nucleotide
  modified_base 34: mod_base = OTHER; note = 2'-O-methyl nucleotide
  modified_base 35: mod_base = OTHER; note = 2'-O-methyl nucleotide
  modified_base 36: mod_base = OTHER; note = 2'-O-methyl nucleotide
  modified_base 37: mod_base = OTHER; note = 2'-O-methyl nucleotide
  modified_base 38: mod_base = OTHER; note = 2'-O-methyl nucleotide
  modified_base 39: mod_base = OTHER; note = 2'-O-methyl nucleotide
  modified_base 40: mod_base = OTHER; note = 2'-O-methyl nucleotide
  modified_base 69: mod_base = OTHER; note = 2'-O-methyl nucleotide
  modified_base 70: mod_base = OTHER; note = 2'-O-methyl nucleotide
  modified_base 71: mod_base = OTHER; note = 2'-O-methyl nucleotide
  modified_base 72: mod_base = OTHER; note = 2'-O-methyl nucleotide
  modified_base 73: mod_base = OTHER; note = 2'-O-methyl nucleotide
  modified_base 74: mod_base = OTHER; note = 2'-O-methyl nucleotide
  modified_base 75: mod_base = OTHER; note = 2'-O-methyl nucleotide
  modified_base 76: mod_base = OTHER; note = 2'-O-methyl nucleotide
  modified_base 77: mod_base = OTHER; note = 2'-O-methyl nucleotide
  modified_base 78: mod_base = OTHER; note = 2'-O-methyl nucleotide
  modified_base 79: mod_base = OTHER; note = 2'-O-methyl nucleotide
  modified_base 80: mod_base = OTHER; note = 2'-O-methyl nucleotide
  modified_base 81: mod_base = OTHER; note = 2'-O-methyl nucleotide
  modified_base 82: mod_base = OTHER; note = 2'-O-methyl nucleotide
  modified_base 83: mod_base = OTHER; note = 2'-O-methyl nucleotide
  modified_base 84: mod_base = OTHER; note = 2'-O-methyl nucleotide
  modified_base 85: mod_base = OTHER; note = 2'-O-methyl nucleotide
  modified_base 86: mod_base = OTHER; note = 2'-O-methyl nucleotide
  modified_base 87: mod_base = OTHER; note = 2'-O-methyl nucleotide
  modified_base 88: mod_base = OTHER; note = 2'-O-methyl nucleotide
  modified_base 89: mod_base = OTHER; note = 2'-O-methyl nucleotide
  modified_base 90: mod_base = OTHER; note = 2'-O-methyl nucleotide
  modified_base 91: mod_base = OTHER; note = 2'-O-methyl nucleotide
  modified_base 92: mod_base = OTHER; note = 2'-O-methyl nucleotide
  modified_base 93: mod_base = OTHER; note = 2'-O-methyl nucleotide
  modified_base 94: mod_base = OTHER; note = 2'-O-methyl nucleotide
  modified_base 95: mod_base = OTHER; note = 2'-O-methyl nucleotide
  modified_base 96: mod_base = OTHER; note = 2'-O-methyl nucleotide
  modified_base 97: mod_base = OTHER; note = 2'-O-methyl nucleotide, phosphorothioate linkage
  modified_base 98: mod_base = OTHER; note = 2'-O-methyl nucleotide, phosphorothioate linkage
  modified_base 99: mod_base = OTHER; note = 2'-O-methyl nucleotide, phosphorothioate linkage
  modified_base 100: mod_base = OTHER; note = 2'-O-methyl nucleotide
  source 1..100: mol_type = other RNA

SEQ ID NO: 659 - RNA, 96 nt, synthetic construct; identical to SEQ ID NO: 611
  misc_feature 1..96: note = Synthetic
  variation 1..20: note = n is a, c, g, or u
  modified_base 1: mod_base = OTHER; note = 2'-O-methyl nucleotide, phosphorothioate linkage
  modified_base 2: mod_base = OTHER; note = 2'-O-methyl nucleotide, phosphorothioate linkage
  modified_base 3: mod_base = OTHER; note = 2'-O-methyl nucleotide, phosphorothioate linkage
  modified_base 29: mod_base = OTHER; note = 2'-O-methyl nucleotide
  modified_base 30: mod_base = OTHER; note = 2'-O-methyl nucleotide
  modified_base 31: mod_base = OTHER; note = 2'-O-methyl nucleotide
  modified_base 32: mod_base = OTHER; note = 2'-O-methyl nucleotide
  modified_base 33: mod_base = OTHER; note = 2'-O-methyl nucleotide
  modified_base 34: mod_base = OTHER; note = 2'-O-methyl nucleotide
  modified_base 35: mod_base = OTHER; note = 2'-O-methyl nucleotide
  modified_base 36: mod_base = OTHER; note = 2'-O-methyl nucleotide
  modified_base 37: mod_base = OTHER; note = 2'-O-methyl nucleotide
  modified_base 38: mod_base = OTHER; note = 2'-O-methyl nucleotide
  modified_base 39: mod_base = OTHER; note = 2'-O-methyl nucleotide
  modified_base 40: mod_base = OTHER; note = 2'-O-methyl nucleotide
  modified_base 69: mod_base = OTHER; note = 2'-O-methyl nucleotide
  modified_base 70: mod_base = OTHER; note = 2'-O-methyl nucleotide
  modified_base 71: mod_base = OTHER; note = 2'-O-methyl nucleotide
  modified_base 72: mod_base = OTHER; note = 2'-O-methyl nucleotide
  modified_base 73: mod_base = OTHER; note = 2'-O-methyl nucleotide
  modified_base 74: mod_base = OTHER; note = 2'-O-methyl nucleotide
  modified_base 75: mod_base = OTHER; note = 2'-O-methyl nucleotide
  modified_base 76: mod_base = OTHER; note = 2'-O-methyl nucleotide
  modified_base 77: mod_base = OTHER; note = 2'-O-methyl nucleotide
  modified_base 78: mod_base = OTHER; note = 2'-O-methyl nucleotide
  modified_base 79: mod_base = OTHER; note = 2'-O-methyl nucleotide
  modified_base 80: mod_base = OTHER; note = 2'-O-methyl nucleotide
  modified_base 81: mod_base = OTHER; note = 2'-O-methyl nucleotide
  modified_base 82: mod_base = OTHER; note = 2'-O-methyl nucleotide
  modified_base 83: mod_base = OTHER; note = 2'-O-methyl nucleotide
  modified_base 84: mod_base = OTHER; note = 2'-O-methyl nucleotide
  modified_base 85: mod_base = OTHER; note = 2'-O-methyl nucleotide
  modified_base 86: mod_base = OTHER; note = 2'-O-methyl nucleotide
  modified_base 87: mod_base = OTHER; note = 2'-O-methyl nucleotide
  modified_base 88: mod_base = OTHER; note = 2'-O-methyl nucleotide
  modified_base 89: mod_base = OTHER; note = 2'-O-methyl nucleotide
  modified_base 90: mod_base = OTHER; note = 2'-O-methyl nucleotide
  modified_base 91: mod_base = OTHER; note = 2'-O-methyl nucleotide
  modified_base 92: mod_base = OTHER; note = 2'-O-methyl nucleotide
  modified_base 93: mod_base = OTHER; note = 2'-O-methyl nucleotide
  modified_base 94: mod_base = OTHER; note = 2'-O-methyl nucleotide
  modified_base 95: mod_base = OTHER; note = 2'-O-methyl nucleotide
  modified_base 96: mod_base = OTHER; note = 2'-O-methyl nucleotide
  source 1..96: mol_type = other RNA

SEQ ID NO: 660 - RNA, 97 nt, synthetic construct; identical to SEQ ID NO: 612
  misc_feature 1..97: note = Synthetic
  variation 1..20: note = n is a, c, g, or u
  modified_base 1: mod_base = OTHER; note = 2'-O-methyl nucleotide, phosphorothioate linkage
  modified_base 2: mod_base = OTHER; note = 2'-O-methyl nucleotide, phosphorothioate linkage
  modified_base 3: mod_base = OTHER; note = 2'-O-methyl nucleotide, phosphorothioate linkage
  modified_base 29: mod_base = OTHER; note = 2'-O-methyl nucleotide
  modified_base 30: mod_base = OTHER; note = 2'-O-methyl nucleotide
  modified_base 31: mod_base = OTHER; note = 2'-O-methyl nucleotide
  modified_base 32: mod_base = OTHER; note = 2'-O-methyl nucleotide
  modified_base 33: mod_base = OTHER; note = 2'-O-methyl nucleotide
  modified_base 34: mod_base = OTHER; note = 2'-O-methyl nucleotide
  modified_base 35: mod_base = OTHER; note = 2'-O-methyl nucleotide
  modified_base 36: mod_base = OTHER; note = 2'-O-methyl nucleotide
  modified_base 37: mod_base = OTHER; note = 2'-O-methyl nucleotide
  modified_base 38: mod_base = OTHER; note = 2'-O-methyl nucleotide
  modified_base 39: mod_base = OTHER; note = 2'-O-methyl nucleotide
  modified_base 40: mod_base = OTHER; note = 2'-O-methyl nucleotide
  modified_base 69: mod_base = OTHER; note = 2'-O-methyl nucleotide
  modified_base 70: mod_base = OTHER; note = 2'-O-methyl nucleotide
  modified_base 71: mod_base = OTHER; note = 2'-O-methyl nucleotide
  modified_base 72: mod_base = OTHER; note = 2'-O-methyl nucleotide
  modified_base 73: mod_base = OTHER; note = 2'-O-methyl nucleotide
  modified_base 74: mod_base = OTHER; note = 2'-O-methyl nucleotide
  modified_base 75: mod_base = OTHER; note = 2'-O-methyl nucleotide
  modified_base 76: mod_base = OTHER; note = 2'-O-methyl nucleotide
  modified_base 77: mod_base = OTHER; note = 2'-O-methyl nucleotide
  modified_base 78: mod_base = OTHER; note = 2'-O-methyl nucleotide
  modified_base 79: mod_base = OTHER; note = 2'-O-methyl nucleotide
  modified_base 80: mod_base = OTHER; note = 2'-O-methyl nucleotide
  modified_base 81: mod_base = OTHER; note = 2'-O-methyl nucleotide
  modified_base 82: mod_base = OTHER; note = 2'-O-methyl nucleotide
  modified_base 83: mod_base = OTHER; note = 2'-O-methyl nucleotide
  modified_base 84: mod_base = OTHER; note = 2'-O-methyl nucleotide
  modified_base 85: mod_base = OTHER; note = 2'-O-methyl nucleotide
  modified_base 86: mod_base = OTHER; note = 2'-O-methyl nucleotide
  modified_base 87: mod_base = OTHER; note = 2'-O-methyl nucleotide
  modified_base 88: mod_base = OTHER; note = 2'-O-methyl nucleotide
  modified_base 89: mod_base = OTHER; note = 2'-O-methyl nucleotide
  modified_base 90: mod_base = OTHER; note = 2'-O-methyl nucleotide
  modified_base 91: mod_base = OTHER; note = 2'-O-methyl nucleotide
  modified_base 92: mod_base = OTHER; note = 2'-O-methyl nucleotide
  modified_base 93: mod_base = OTHER; note = 2'-O-methyl nucleotide
  modified_base 94: mod_base = OTHER; note = 2'-O-methyl nucleotide
  modified_base 95: mod_base = OTHER; note = 2'-O-methyl nucleotide
  modified_base 96: mod_base = OTHER; note = 2'-O-methyl nucleotide
  modified_base 97: mod_base = OTHER; note = 2'-O-methyl nucleotide
  source 1..97: mol_type = other RNA

SEQ ID NO: 661 - RNA, 88 nt, synthetic construct; identical to SEQ ID NO: 613
  misc_feature 1..88: note = Synthetic
  variation 1..20: note = n is a, c, g, or u
  modified_base 1: mod_base = OTHER; note = 2'-O-methyl nucleotide, phosphorothioate linkage
  modified_base 2: mod_base = OTHER; note = 2'-O-methyl nucleotide, phosphorothioate linkage
  modified_base 3: mod_base = OTHER; note = 2'-O-methyl nucleotide, phosphorothioate linkage
  modified_base 29: mod_base = OTHER; note = 2'-O-methyl nucleotide
  modified_base 30: mod_base = OTHER; note = 2'-O-methyl nucleotide
  modified_base 31: mod_base = OTHER; note = 2'-O-methyl nucleotide
  modified_base 32: mod_base = OTHER; note = 2'-O-methyl nucleotide
  modified_base 33: mod_base = OTHER; note = 2'-O-methyl nucleotide
  modified_base 34: mod_base = OTHER; note = 2'-O-methyl nucleotide
  modified_base 35: mod_base = OTHER; note = 2'-O-methyl nucleotide
  modified_base 36: mod_base = OTHER; note = 2'-O-methyl nucleotide
  modified_base 37: mod_base = OTHER; note = 2'-O-methyl nucleotide
  modified_base 38: mod_base = OTHER; note = 2'-O-methyl nucleotide
  modified_base 39: mod_base = OTHER; note = 2'-O-methyl nucleotide
  modified_base 40: mod_base = OTHER; note = 2'-O-methyl nucleotide
  modified_base 85: mod_base = OTHER; note = phosphorothioate linkage
  modified_base 86: mod_base = OTHER; note = 2'-O-methyl nucleotide, phosphorothioate linkage
  modified_base 87: mod_base = OTHER; note = 2'-O-methyl nucleotide, phosphorothioate linkage
  modified_base 88: mod_base = OTHER; note = 2'-O-methyl nucleotide
  source 1..88: mol_type = other RNA

SEQ ID NO: 662 - RNA, 88 nt, synthetic construct; identical to SEQ ID NO: 614
  misc_feature 1..88: note = Synthetic
  variation 1..20: note = n is a, c, g, or u
  modified_base 1: mod_base = OTHER; note = 2'-O-methyl nucleotide, phosphorothioate linkage
  modified_base 2: mod_base = OTHER; note = 2'-O-methyl nucleotide, phosphorothioate linkage
  modified_base 3: mod_base = OTHER; note = 2'-O-methyl nucleotide, phosphorothioate linkage
  modified_base 29: mod_base = OTHER; note = 2'-O-methyl nucleotide
  modified_base 30: mod_base = OTHER; note = 2'-O-methyl nucleotide
  modified_base 31: mod_base = OTHER; note = 2'-O-methyl nucleotide
  modified_base 32: mod_base = OTHER; note = 2'-O-methyl nucleotide
  modified_base 33: mod_base = OTHER; note = 2'-O-methyl nucleotide
  modified_base 34: mod_base = OTHER; note = 2'-O-methyl nucleotide
  modified_base 35: mod_base = OTHER; note = 2'-O-methyl nucleotide
  modified_base 36: mod_base = OTHER; note = 2'-O-methyl nucleotide
  modified_base 37: mod_base = OTHER; note = 2'-O-methyl nucleotide
  modified_base 38: mod_base = OTHER; note = 2'-O-methyl nucleotide
  modified_base 39: mod_base = OTHER; note = 2'-O-methyl nucleotide
  modified_base 40: mod_base = OTHER; note = 2'-O-methyl nucleotide
  modified_base 85: mod_base = OTHER; note = phosphorothioate linkage
  modified_base 86: mod_base = OTHER; note = 2'-O-methyl nucleotide, phosphorothioate linkage
  modified_base 87: mod_base = OTHER; note = 2'-O-methyl nucleotide, phosphorothioate linkage
  modified_base 88: mod_base = OTHER; note = 2'-O-methyl nucleotide
  source 1..88: mol_type = other RNA

SEQ ID NO: 663 - RNA, 88 nt, synthetic construct; identical to SEQ ID NO: 614
  misc_feature 1..88: note = Synthetic
  variation 1..20: note = n is a, c, g, or u
  modified_base 1: mod_base = OTHER; note = 2'-O-methyl nucleotide, phosphorothioate linkage
  modified_base 2: mod_base = OTHER; note = 2'-O-methyl nucleotide, phosphorothioate linkage
  modified_base 3: mod_base = OTHER; note = 2'-O-methyl nucleotide, phosphorothioate linkage
  modified_base 29: mod_base = OTHER; note = 2'-O-methyl nucleotide
  modified_base 30: mod_base = OTHER; note = 2'-O-methyl nucleotide
  modified_base 31: mod_base = OTHER; note = 2'-O-methyl nucleotide
  modified_base 32: mod_base = OTHER; note = 2'-O-methyl nucleotide
  modified_base 33: mod_base = OTHER; note = 2'-O-methyl nucleotide
  modified_base 34: mod_base = OTHER; note = 2'-O-methyl nucleotide
  modified_base 35: mod_base = OTHER; note = 2'-O-methyl nucleotide
  modified_base 36: mod_base = OTHER; note = 2'-O-methyl nucleotide
  modified_base 37: mod_base = OTHER; note = 2'-O-methyl nucleotide
  modified_base 38: mod_base = OTHER; note = 2'-O-methyl nucleotide
  modified_base 39: mod_base = OTHER; note = 2'-O-methyl nucleotide
  modified_base 40: mod_base = OTHER; note = 2'-O-methyl nucleotide
  modified_base 69: mod_base = OTHER; note = 2'-O-methyl nucleotide
  modified_base 70: mod_base = OTHER; note = 2'-O-methyl nucleotide
  modified_base 71: mod_base = OTHER; note = 2'-O-methyl nucleotide
  modified_base 72: mod_base = OTHER; note = 2'-O-methyl nucleotide
  modified_base 73: mod_base = OTHER; note = 2'-O-methyl nucleotide
  modified_base 74: mod_base = OTHER; note = 2'-O-methyl nucleotide
  modified_base 75: mod_base = OTHER; note = 2'-O-methyl nucleotide
  modified_base 76: mod_base = OTHER; note = 2'-O-methyl nucleotide
  modified_base 77: mod_base = OTHER; note = 2'-O-methyl nucleotide
  modified_base 78: mod_base = OTHER; note = 2'-O-methyl nucleotide
  modified_base 79: mod_base = OTHER; note = 2'-O-methyl nucleotide
  modified_base 80: mod_base = OTHER; note = 2'-O-methyl nucleotide
  modified_base 81: mod_base = OTHER; note = 2'-O-methyl nucleotide
  modified_base 82: mod_base = OTHER; note = 2'-O-methyl nucleotide
  modified_base 83: mod_base = OTHER; note = 2'-O-methyl nucleotide
  modified_base 84: mod_base = OTHER; note = 2'-O-methyl nucleotide
  modified_base 85: mod_base = OTHER; note = 2'-O-methyl nucleotide, phosphorothioate linkage
  modified_base 86: mod_base = OTHER; note = 2'-O-methyl nucleotide, phosphorothioate linkage
  modified_base 87: mod_base = OTHER; note = 2'-O-methyl nucleotide, phosphorothioate linkage
  modified_base 88: mod_base = OTHER; note = 2'-O-methyl nucleotide
  source 1..88: mol_type = other RNA

SEQ ID NO: 664 - RNA, 90 nt, synthetic construct; identical to SEQ ID NO: 616
  misc_feature 1..90: note = Synthetic
  variation 1..20: note = n is a, c, g, or u
  modified_base 1: mod_base = OTHER; note = 2'-O-methyl nucleotide, phosphorothioate linkage
  modified_base 2: mod_base = OTHER; note = 2'-O-methyl nucleotide, phosphorothioate linkage
  modified_base 3: mod_base = OTHER; note = 2'-O-methyl nucleotide, phosphorothioate linkage
  modified_base 29: mod_base = OTHER; note = 2'-O-methyl nucleotide
  modified_base 30: mod_base = OTHER; note = 2'-O-methyl nucleotide
  modified_base 31: mod_base = OTHER; note = 2'-O-methyl nucleotide
  modified_base 32: mod_base = OTHER; note = 2'-O-methyl nucleotide
  modified_base 33: mod_base = OTHER; note = 2'-O-methyl nucleotide
  modified_base 34: mod_base = OTHER; note = 2'-O-methyl nucleotide
  modified_base 35: mod_base = OTHER; note = 2'-O-methyl nucleotide
  modified_base 36: mod_base = OTHER; note = 2'-O-methyl nucleotide
  modified_base 37: mod_base = OTHER; note = 2'-O-methyl nucleotide
  modified_base 38: mod_base = OTHER; note = 2'-O-methyl nucleotide
  modified_base 39: mod_base = OTHER; note = 2'-O-methyl nucleotide
  modified_base 40: mod_base = OTHER; note = 2'-O-methyl nucleotide
  modified_base 87: mod_base = OTHER; note = phosphorothioate linkage
  modified_base 88: mod_base = OTHER; note = 2'-O-methyl nucleotide, phosphorothioate linkage
  modified_base 89: mod_base = OTHER; note = 2'-O-methyl nucleotide, phosphorothioate linkage
  modified_base 90: mod_base = OTHER; note = 2'-O-methyl nucleotide
  source 1..90: mol_type = other RNA

SEQ ID NO: 665 - RNA, 90 nt, synthetic construct; identical to SEQ ID NO: 616
  misc_feature 1..90: note = Synthetic
  variation 1..20: note = n is a, c, g, or u
  modified_base 1: mod_base = OTHER; note = 2'-O-methyl nucleotide, phosphorothioate linkage
  modified_base 2: mod_base = OTHER; note = 2'-O-methyl nucleotide, phosphorothioate linkage
  modified_base 3: mod_base = OTHER; note = 2'-O-methyl nucleotide, phosphorothioate linkage
  modified_base 29: mod_base = OTHER; note = 2'-O-methyl nucleotide
  modified_base 30: mod_base = OTHER; note = 2'-O-methyl nucleotide
  modified_base 31: mod_base = OTHER; note = 2'-O-methyl nucleotide
  modified_base 32: mod_base = OTHER; note = 2'-O-methyl nucleotide
  modified_base 33: mod_base = OTHER; note = 2'-O-methyl nucleotide
  modified_base 34: mod_base = OTHER; note = 2'-O-methyl nucleotide
  modified_base 35: mod_base = OTHER; note = 2'-O-methyl nucleotide
  modified_base 36: mod_base = OTHER; note = 2'-O-methyl nucleotide
  modified_base 37: mod_base = OTHER; note = 2'-O-methyl nucleotide
  modified_base 38: mod_base = OTHER; note = 2'-O-methyl nucleotide
  modified_base 39: mod_base = OTHER; note = 2'-O-methyl nucleotide
  modified_base 40: mod_base = OTHER; note = 2'-O-methyl nucleotide
  modified_base 69: mod_base = OTHER; note = 2'-O-methyl nucleotide
  modified_base 70: mod_base = OTHER; note = 2'-O-methyl nucleotide
  modified_base 71: mod_base = OTHER; note = 2'-O-methyl nucleotide
  modified_base 72: mod_base = OTHER; note = 2'-O-methyl nucleotide
  modified_base 73: mod_base = OTHER; note = 2'-O-methyl nucleotide
  modified_base 74: mod_base = OTHER; note = 2'-O-methyl nucleotide
  modified_base 75: mod_base = OTHER; note = 2'-O-methyl nucleotide
  modified_base 76: mod_base = OTHER; note = 2'-O-methyl nucleotide
  modified_base 77: mod_base = OTHER; note = 2'-O-methyl nucleotide
  modified_base 78: mod_base = OTHER; note = 2'-O-methyl nucleotide
  modified_base 79: mod_base = OTHER; note = 2'-O-methyl nucleotide
  modified_base 80: mod_base = OTHER; note = 2'-O-methyl nucleotide
  modified_base 81: mod_base = OTHER; note = 2'-O-methyl nucleotide
  modified_base 82: mod_base = OTHER; note = 2'-O-methyl nucleotide
  modified_base 83: mod_base = OTHER; note = 2'-O-methyl nucleotide
  modified_base 84: mod_base = OTHER; note = 2'-O-methyl nucleotide
  modified_base 85: mod_base = OTHER; note = 2'-O-methyl nucleotide
  modified_base 86: mod_base = OTHER; note = 2'-O-methyl nucleotide
  modified_base 87: mod_base = OTHER; note = 2'-O-methyl nucleotide, phosphorothioate linkage
  modified_base 88: mod_base = OTHER; note = 2'-O-methyl nucleotide, phosphorothioate linkage
  modified_base 89: mod_base = OTHER; note = 2'-O-methyl nucleotide, phosphorothioate linkage
  modified_base 90: mod_base = OTHER; note = 2'-O-methyl nucleotide
  source 1..90: mol_type = other RNA

SEQ ID NO: 666 - RNA, 91 nt, synthetic construct; identical to SEQ ID NO: 617
  misc_feature 1..91: note = Synthetic
  variation 1..20: note = n is a, c, g, or u
  modified_base 1: mod_base = OTHER; note = 2'-O-methyl nucleotide, phosphorothioate linkage
  modified_base 2: mod_base = OTHER; note = 2'-O-methyl nucleotide, phosphorothioate linkage
  modified_base 3: mod_base = OTHER; note = 2'-O-methyl nucleotide, phosphorothioate linkage
  modified_base 29: mod_base = OTHER; note = 2'-O-methyl nucleotide
  modified_base 30: mod_base = OTHER; note = 2'-O-methyl nucleotide
  modified_base 31: mod_base = OTHER; note = 2'-O-methyl nucleotide
  modified_base 32: mod_base = OTHER; note = 2'-O-methyl nucleotide
  modified_base 33: mod_base = OTHER; note = 2'-O-methyl nucleotide
  modified_base 34: mod_base = OTHER; note = 2'-O-methyl nucleotide
  modified_base 35: mod_base = OTHER; note = 2'-O-methyl nucleotide
  modified_base 36: mod_base = OTHER; note = 2'-O-methyl nucleotide
  modified_base 37: mod_base = OTHER; note = 2'-O-methyl nucleotide
  modified_base 38: mod_base = OTHER; note = 2'-O-methyl nucleotide
  modified_base 39: mod_base = OTHER; note = 2'-O-methyl nucleotide
  modified_base 40: mod_base = OTHER; note = 2'-O-methyl nucleotide
  modified_base 88: mod_base = OTHER; note = phosphorothioate linkage
  modified_base 89: mod_base = OTHER; note = 2'-O-methyl nucleotide, phosphorothioate linkage
  modified_base 90: mod_base = OTHER; note = 2'-O-methyl nucleotide, phosphorothioate linkage
  modified_base 91: mod_base = OTHER; note = 2'-O-methyl nucleotide
  source 1..91: mol_type = other RNA

SEQ ID NO: 667 - RNA, 91 nt, synthetic construct; identical to SEQ ID NO: 617
  misc_feature 1..91: note = Synthetic
  variation 1..20: note = n is a, c, g, or u
  modified_base 1: mod_base = OTHER; note = 2'-O-methyl nucleotide, phosphorothioate linkage
  modified_base 2: mod_base = OTHER; note = 2'-O-methyl nucleotide, phosphorothioate linkage
  modified_base 3: mod_base = OTHER; note = 2'-O-methyl nucleotide, phosphorothioate linkage
  modified_base 29: mod_base = OTHER; note = 2'-O-methyl nucleotide
  modified_base 30: mod_base = OTHER; note = 2'-O-methyl nucleotide
  modified_base 31: mod_base = OTHER; note = 2'-O-methyl nucleotide
  modified_base 32: mod_base = OTHER; note = 2'-O-methyl nucleotide
  modified_base 33: mod_base = OTHER; note = 2'-O-methyl nucleotide
  modified_base 34: mod_base = OTHER; note = 2'-O-methyl nucleotide
  modified_base 35: mod_base = OTHER; note = 2'-O-methyl nucleotide
  modified_base 36: mod_base = OTHER; note = 2'-O-methyl nucleotide
  modified_base 37: mod_base = OTHER; note = 2'-O-methyl nucleotide
  modified_base 38: mod_base = OTHER; note = 2'-O-methyl nucleotide
  modified_base 39: mod_base = OTHER; note = 2'-O-methyl nucleotide
  modified_base 40: mod_base = OTHER; note = 2'-O-methyl nucleotide
  modified_base 88: mod_base = OTHER; note = 2'-O-methyl nucleotide
  modified_base 89: mod_base = OTHER; note = 2'-O-methyl nucleotide
  modified_base 90: mod_base = OTHER; note = 2'-O-methyl nucleotide, phosphorothioate linkage
  modified_base 91: mod_base = OTHER; note = 2'-O-methyl nucleotide
  source 1..91: mol_type = other RNA

SEQ ID NO: 668 - RNA, 91 nt, synthetic construct; identical to SEQ ID NO: 617
  misc_feature 1..91: note = Synthetic
  variation 1..20: note = n is a, c, g, or u
  modified_base 1: mod_base = OTHER; note = 2'-O-methyl nucleotide, phosphorothioate linkage
  modified_base 2: mod_base = OTHER; note = 2'-O-methyl nucleotide, phosphorothioate linkage
  modified_base 3: mod_base = OTHER; note = 2'-O-methyl nucleotide, phosphorothioate linkage
  modified_base 25: mod_base = OTHER; note = 2'-fluoro modification
  modified_base 28: mod_base = OTHER; note = 2'-O-methyl nucleotide
  modified_base 29: mod_base = OTHER; note = 2'-O-methyl nucleotide
  modified_base 30: mod_base = OTHER; note = 2'-O-methyl nucleotide
  modified_base 31: mod_base = OTHER; note = 2'-O-methyl nucleotide
  modified_base 32: mod_base = OTHER; note = 2'-O-methyl nucleotide
  modified_base 33: mod_base = OTHER; note = 2'-O-methyl nucleotide
  modified_base 34: mod_base = OTHER; note = 2'-O-methyl nucleotide
  modified_base 35: mod_base = OTHER; note = 2'-O-methyl nucleotide
  modified_base 36: mod_base = OTHER; note = 2'-O-methyl nucleotide
  modified_base 37: mod_base = OTHER; note = 2'-O-methyl nucleotide
  modified_base 38: mod_base = OTHER; note = 2'-O-methyl nucleotide
  modified_base 39: mod_base = OTHER; note = 2'-O-methyl nucleotide
  modified_base 40: mod_base = OTHER; note = 2'-O-methyl nucleotide
  modified_base 41: mod_base = OTHER; note = 2'-O-methyl nucleotide
  modified_base 42: mod_base = OTHER; note = 2'-O-methyl nucleotide
  modified_base 45: mod_base = OTHER; note = 2'-fluoro modification
  modified_base 46: mod_base = OTHER; note = 2'-O-methyl nucleotide
  modified_base 47: mod_base = OTHER; note = 2'-fluoro modification
  modified_base 48: mod_base = OTHER; note = 2'-O-methyl nucleotide
  modified_base 49: mod_base = OTHER; note = 2'-fluoro modification
  modified_base 50: mod_base = OTHER; note = 2'-O-methyl nucleotide
  modified_base 52: mod_base = OTHER; note = 2'-O-methyl nucleotide
  modified_base 53: mod_base = OTHER; note = 2'-O-methyl nucleotide
  modified_base 54: mod_base = OTHER; note = 2'-O-methyl nucleotide
  modified_base 55: mod_base = OTHER; note = 2'-O-methyl nucleotide
  modified_base 56: mod_base = OTHER; note = 2'-O-methyl nucleotide
  modified_base 57: mod_base = OTHER; note = 2'-O-methyl nucleotide
  modified_base 60: mod_base = OTHER; note = 2'-O-methyl nucleotide
  modified_base 61: mod_base = OTHER; note = 2'-O-methyl nucleotide
  modified_base 64: mod_base = OTHER; note = 2'-fluoro modification
  modified_base 66: mod_base = OTHER; note = 2'-O-methyl nucleotide
  modified_base 67: mod_base = OTHER; note = 2'-O-methyl nucleotide
  modified_base 69: mod_base = OTHER; note = 2'-O-methyl nucleotide
  modified_base 70: mod_base = OTHER; note = 2'-O-methyl nucleotide
  modified_base 71: mod_base = OTHER; note = 2'-O-methyl nucleotide
  modified_base 72: mod_base = OTHER; note = 2'-O-methyl nucleotide
  modified_base 73: mod_base = OTHER; note = 2'-O-methyl nucleotide
  modified_base 74: mod_base = OTHER; note = 2'-O-methyl nucleotide
  modified_base 75: mod_base = OTHER; note = 2'-O-methyl nucleotide
  modified_base 76: mod_base = OTHER; note = 2'-O-methyl nucleotide
  modified_base 77: mod_base = OTHER; note = 2'-O-methyl nucleotide
  modified_base 78: mod_base = OTHER; note = 2'-O-methyl nucleotide
  modified_base 79: mod_base = OTHER; note = 2'-O-methyl nucleotide
  modified_base 80: mod_base = OTHER; note = 2'-O-methyl nucleotide
  modified_base 81: mod_base = OTHER; note = 2'-O-methyl nucleotide
  modified_base 82: mod_base = OTHER; note = 2'-O-methyl nucleotide
  modified_base 83: mod_base = OTHER; note = 2'-O-methyl nucleotide
  modified_base 84: mod_base = OTHER; note = 2'-O-methyl nucleotide
  modified_base 85: mod_base = OTHER; note = 2'-O-methyl nucleotide
  modified_base 86: mod_base = OTHER; note = 2'-O-methyl nucleotide
  modified_base 87: mod_base = OTHER; note = 2'-O-methyl nucleotide
  modified_base 88: mod_base = OTHER; note = 2'-O-methyl nucleotide, phosphorothioate linkage
  modified_base 89: mod_base = OTHER; note = 2'-O-methyl nucleotide, phosphorothioate linkage
  modified_base 90: mod_base = OTHER; note = 2'-O-methyl nucleotide, phosphorothioate linkage
  modified_base 91: mod_base = OTHER; note = 2'-O-methyl nucleotide
  source 1..91: mol_type = other RNA

SEQ ID NO: 669 - RNA, 91 nt, synthetic construct; identical to SEQ ID NO: 617
  misc_feature 1..91: note = Synthetic
  variation 1..20: note = n is a, c, g, or u
  modified_base 1: mod_base = OTHER; note = 2'-O-methyl nucleotide, phosphorothioate linkage
  modified_base 2: mod_base = OTHER; note = 2'-O-methyl nucleotide, phosphorothioate linkage
  modified_base 3: mod_base = OTHER; note = 2'-O-methyl nucleotide, phosphorothioate linkage
  modified_base 29: mod_base = OTHER; note = 2'-O-methyl nucleotide
  modified_base 30: mod_base = OTHER; note = 2'-O-methyl nucleotide
  modified_base 31: mod_base = OTHER; note = 2'-O-methyl nucleotide
  modified_base 32: mod_base = OTHER; note = 2'-O-methyl nucleotide
  modified_base 33: mod_base = OTHER; note = 2'-O-methyl nucleotide
  modified_base 34: mod_base = OTHER; note = 2'-O-methyl nucleotide
  modified_base 35: mod_base = OTHER; note = 2'-O-methyl nucleotide
  modified_base 36: mod_base = OTHER; note = 2'-O-methyl nucleotide
  modified_base 37: mod_base = OTHER; note = 2'-O-methyl nucleotide
  modified_base 38: mod_base = OTHER; note = 2'-O-methyl nucleotide
  modified_base 39: mod_base = OTHER; note = 2'-O-methyl nucleotide
  modified_base 40: mod_base = OTHER; note = 2'-O-methyl nucleotide
  modified_base 88: mod_base = OTHER; note = 2'-O-methyl nucleotide, phosphorothioate linkage
  modified_base 89: mod_base = OTHER; note = 2'-O-methyl nucleotide, phosphorothioate linkage
  modified_base 90: mod_base = OTHER; note = 2'-O-methyl nucleotide, phosphorothioate linkage
  modified_base 91: mod_base = OTHER; note = 2'-O-methyl nucleotide
  source 1..91: mol_type = other RNA

SEQ ID NO: 670 - RNA, 90 nt, synthetic construct
  misc_feature 1..90: note = Synthetic
  variation 1..20: note = n is a, c, g, or u
  source 1..90: mol_type = other RNA
  misc_feature 32..33: note = site of Linker L1
  misc_feature 51..52: note = site of Linker L2
  misc_feature 66..67: note = site of Linker L1
nnnnnnnnnnnnnnnnnnnngttttagagctatagcaagttaaaataaggcgtccgttatcaacttaagtggcaccgagtcggtgctttt

SEQ ID NO: 671 - RNA, 80 nt, synthetic construct
  misc_feature 1..80: note = Synthetic
  variation 1..20: note = n is a, c, g, or u
  source 1..80: mol_type = other RNA
  misc_feature 32..33: note = site of Linker L1
  misc_feature 51..52: note = site of Linker L2
  misc_feature 63..64: note = site of Linker L1
nnnnnnnnnnnnnnnnnnnngttttagagctatagcaagttaaaataaggcgtccgttatcacgggcaccgagtcggtgc

SEQ ID NO: 672 - RNA, 80 nt, synthetic construct; identical to SEQ ID NO: 671
  misc_feature 1..80: note = Synthetic
  variation 1..20: note = n is a, c, g, or u
  modified_base 1: mod_base = OTHER; note = 2'-O-methyl nucleotide, phosphorothioate linkage
  modified_base 2: mod_base = OTHER; note = 2'-O-methyl nucleotide, phosphorothioate linkage
  modified_base 3: mod_base = OTHER; note = 2'-O-methyl nucleotide, phosphorothioate linkage
  modified_base 29: mod_base = OTHER; note = 2'-O-methyl nucleotide
  modified_base 30: mod_base = OTHER; note = 2'-O-methyl nucleotide
  modified_base 31: mod_base = OTHER; note = 2'-O-methyl nucleotide
  modified_base 32: mod_base = OTHER; note = 2'-O-methyl nucleotide
  misc_feature 32..33: note = site of linker L1
  modified_base 33: mod_base = OTHER; note = 2'-O-methyl nucleotide
  modified_base 34: mod_base = OTHER; note = 2'-O-methyl nucleotide
  modified_base 35: mod_base = OTHER; note = 2'-O-methyl nucleotide
  modified_base 36: mod_base = OTHER; note = 2'-O-methyl nucleotide
  misc_feature 51..52: note = site of linker L2
  misc_feature 63..64: note = site of linker L1
  modified_base 77: mod_base = OTHER; note = phosphorothioate linkage
  modified_base 78: mod_base = OTHER; note = 2'-O-methyl nucleotide, phosphorothioate linkage
  modified_base 79: mod_base = OTHER; note = 2'-O-methyl nucleotide, phosphorothioate linkage
  modified_base 80: mod_base = OTHER; note = 2'-O-methyl nucleotide
  source 1..80: mol_type = other RNA

SEQ ID NO: 673 - RNA, 78 nt, synthetic construct
  misc_feature 1..78: note = Synthetic
  variation 1..20: note = n is a, c, g, or u
  modified_base 1: mod_base = OTHER; note = 2'-O-methyl nucleotide, phosphorothioate linkage
  modified_base 2: mod_base = OTHER; note = 2'-O-methyl nucleotide, phosphorothioate linkage
  modified_base 3: mod_base = OTHER; note = 2'-O-methyl nucleotide, phosphorothioate linkage
  modified_base 29: mod_base = OTHER; note = 2'-O-methyl nucleotide
  modified_base 30: mod_base = OTHER; note = 2'-O-methyl nucleotide
  modified_base 31: mod_base = OTHER; note = 2'-O-methyl nucleotide
  modified_base 32: mod_base = OTHER; note = 2'-O-methyl nucleotide
  misc_feature 32..33: note = site of linker L1
  modified_base 33: mod_base = OTHER; note = 2'-O-methyl nucleotide
  modified_base 34: mod_base = OTHER; note = 2'-O-methyl nucleotide
  modified_base 35: mod_base = OTHER; note = 2'-O-methyl nucleotide
  modified_base 36: mod_base = OTHER; note = 2'-O-methyl nucleotide
  misc_feature 51..52: note = site of linker L2
  misc_feature 62..63: note = site of linker L1
  modified_base 75: mod_base = OTHER; note = phosphorothioate linkage
  modified_base 76: mod_base = OTHER; note = 2'-O-methyl nucleotide, phosphorothioate linkage
  modified_base 77: mod_base = OTHER; note = 2'-O-methyl nucleotide, phosphorothioate linkage
  modified_base 78: mod_base = OTHER; note = 2'-O-methyl nucleotide
  source 1..78: mol_type = other RNA
nnnnnnnnnnnnnnnnnnnngttttagagctatagcaagttaaaataaggcgtccgttatcaggcaccgagtcggtgc

SEQ ID NO: 674 - RNA, 78 nt, synthetic construct
  misc_feature 1..78: note = Synthetic
  variation 1..20: note = n is a, c, g, or u
  modified_base 1: mod_base = OTHER; note = 2'-O-methyl nucleotide, phosphorothioate linkage
  modified_base 2: mod_base = OTHER; note = 2'-O-methyl nucleotide, phosphorothioate linkage
  modified_base 3: mod_base = OTHER; note = 2'-O-methyl nucleotide, phosphorothioate linkage
  modified_base 29: mod_base = OTHER; note = 2'-O-methyl nucleotide
  modified_base 30: mod_base = OTHER; note = 2'-O-methyl nucleotide
  modified_base 31: mod_base = OTHER; note = 2'-O-methyl nucleotide
  misc_feature 30..31: note = site of linker L1
  modified_base 32: mod_base = OTHER; note = 2'-O-methyl nucleotide
  modified_base 33: mod_base = OTHER; note = 2'-O-methyl nucleotide
  modified_base 34: mod_base = OTHER; note = 2'-O-methyl nucleotide
  misc_feature 49..50: note = site of linker L2
  misc_feature 61..62: note = site of linker L1
  modified_base 75: mod_base = OTHER; note = phosphorothioate linkage
  modified_base 76: mod_base = OTHER; note = 2'-O-methyl nucleotide, phosphorothioate linkage
  modified_base 77: mod_base = OTHER; note = 2'-O-methyl nucleotide, phosphorothioate linkage
  modified_base 78: mod_base = OTHER; note = 2'-O-methyl nucleotide
  source 1..78: mol_type = other RNA
nnnnnnnnnnnnnnnnnnnngttttagagctagcaagttaaaataaggcgtccgttatcacgggcaccgagtcggtgc

SEQ ID NO: 675 - RNA, 76 nt, synthetic construct
  misc_feature 1..76: note = Synthetic
  variation 1..20: note = n is a, c, g, or u
  modified_base 1: mod_base = OTHER; note = 2'-O-methyl nucleotide, phosphorothioate linkage
  modified_base 2: mod_base = OTHER; note = 2'-O-methyl nucleotide, phosphorothioate linkage
  modified_base 3: mod_base = OTHER; note = 2'-O-methyl nucleotide, phosphorothioate linkage
  modified_base 29: mod_base = OTHER; note = 2'-O-methyl nucleotide
  modified_base 30: mod_base = OTHER; note = 2'-O-methyl nucleotide
  modified_base 31: mod_base = OTHER; note = 2'-O-methyl nucleotide
  misc_feature 31..32: note = site of linker L1
  modified_base 32: mod_base = OTHER; note = 2'-O-methyl nucleotide
  modified_base 33: mod_base = OTHER; note = 2'-O-methyl nucleotide
  modified_base 34: mod_base = OTHER; note = 2'-O-methyl nucleotide
  misc_feature 49..50: note = site of linker L2
  misc_feature 60..61: note = site of linker L1
  modified_base 73: mod_base = OTHER; note = phosphorothioate linkage
  modified_base 74: mod_base = OTHER; note = 2'-O-methyl nucleotide, phosphorothioate linkage
  modified_base 75: mod_base = OTHER; note = 2'-O-methyl nucleotide, phosphorothioate linkage
  modified_base 76: mod_base = OTHER; note = 2'-O-methyl nucleotide
  source 1..76: mol_type = other RNA
nnnnnnnnnnnnnnnnnnnngttttagagctagcaagttaaaataaggcgtccgttatcaggcaccgagtcggtgc

SEQ ID NO: 676 - RNA, 76 nt, synthetic construct; identical to SEQ ID NO: 675
  misc_feature 1..76: note = Synthetic
  variation 1..20: note = n is a, c, g, or u
  modified_base 1: mod_base = OTHER; note = 2'-O-methyl nucleotide, phosphorothioate linkage
  modified_base 2: mod_base = OTHER; note = 2'-O-methyl nucleotide, phosphorothioate linkage
  modified_base 3: mod_base = OTHER; note = 2'-O-methyl nucleotide, phosphorothioate linkage
  modified_base 29: mod_base = OTHER; note = 2'-O-methyl nucleotide
  modified_base 30: mod_base = OTHER; note = 2'-O-methyl nucleotide
  modified_base 31: mod_base = OTHER; note = 2'-O-methyl nucleotide
  misc_feature 31..32: note = site of linker L1
  modified_base 32: mod_base = OTHER; note = 2'-O-methyl nucleotide
  modified_base 33: mod_base = OTHER; note = 2'-O-methyl nucleotide
  modified_base 34: mod_base = OTHER; note = 2'-O-methyl nucleotide
  misc_feature 49..50: note = site of linker L2
  misc_feature 60..61: note = site of linker L1
  modified_base 73: mod_base = OTHER; note = phosphorothioate linkage
  modified_base 74: mod_base = OTHER; note = 2'-O-methyl nucleotide, phosphorothioate linkage
  modified_base 75: mod_base = OTHER; note = 2'-O-methyl nucleotide, phosphorothioate linkage
  modified_base 76: mod_base = OTHER; note = 2'-O-methyl nucleotide
  source 1..76: mol_type = other RNA

SEQ ID NO: 677 - RNA, 76 nt, synthetic construct; identical to SEQ ID NO: 675
  misc_feature 1..76: note = Synthetic
  variation 1..20: note = n is a, c, g, or u
  modified_base 1: mod_base = OTHER; note = 2'-O-methyl nucleotide, phosphorothioate linkage
  modified_base 2: mod_base = OTHER; note = 2'-O-methyl nucleotide, phosphorothioate linkage
  modified_base 3: mod_base = OTHER; note = 2'-O-methyl nucleotide, phosphorothioate linkage
  modified_base 29: mod_base = OTHER; note = 2'-O-methyl nucleotide
  modified_base 30: mod_base = OTHER; note = 2'-O-methyl nucleotide
  modified_base 31: mod_base = OTHER; note = 2'-O-methyl nucleotide
  misc_feature 31..32: note = site of linker L1
  modified_base 32: mod_base = OTHER; note = 2'-O-methyl nucleotide
  modified_base 33: mod_base = OTHER; note = 2'-O-methyl nucleotide
  modified_base 34: mod_base = OTHER; note = 2'-O-methyl nucleotide
  misc_feature 49..50: note = site of linker L2
  misc_feature 60..61: note = site of linker L1
  modified_base 73: mod_base = OTHER; note = phosphorothioate linkage
  modified_base 74: mod_base = OTHER; note = 2'-O-methyl nucleotide, phosphorothioate linkage
  modified_base 75: mod_base = OTHER; note = 2'-O-methyl nucleotide, phosphorothioate linkage
  modified_base 76: mod_base = OTHER; note = 2'-O-methyl nucleotide
  source 1..76: mol_type = other RNA

SEQ ID NO: 678 - RNA, 80 nt, synthetic construct; identical to SEQ ID NO: 671
  misc_feature 1..80: note = Synthetic
  variation 1..20: note = n is a, c, g, or u
  modified_base 1: mod_base = OTHER; note = 2'-O-methyl nucleotide, phosphorothioate linkage
  modified_base 2: mod_base = OTHER; note = 2'-O-methyl nucleotide, phosphorothioate linkage
  modified_base 3: mod_base = OTHER; note = 2'-O-methyl nucleotide, phosphorothioate linkage
  modified_base 29: mod_base = OTHER; note = 2'-O-methyl nucleotide
  modified_base 30: mod_base = OTHER; note = 2'-O-methyl nucleotide
  modified_base 31: mod_base = OTHER; note = 2'-O-methyl nucleotide
  modified_base 32: mod_base = OTHER; note = 2'-O-methyl nucleotide
  misc_feature 32..33: note = site of linker L1
  modified_base 33: mod_base = OTHER; note = 2'-O-methyl nucleotide
  modified_base 34: mod_base = OTHER; note = 2'-O-methyl nucleotide
  modified_base 35: mod_base = OTHER; note = 2'-O-methyl nucleotide
  modified_base 36: mod_base = OTHER; note = 2'-O-methyl nucleotide
  misc_feature 51..52: note = site of linker L2
  misc_feature 63..64: note = site of linker L1
  modified_base 77: mod_base = OTHER; note = phosphorothioate linkage
  modified_base 78: mod_base = OTHER; note = 2'-O-methyl nucleotide, phosphorothioate linkage
  modified_base 79: mod_base = OTHER; note = 2'-O-methyl nucleotide, phosphorothioate linkage
  modified_base 80: mod_base = OTHER; note = 2'-O-methyl nucleotide
  source 1..80: mol_type = other RNA

SEQ ID NO: 679 - RNA, 78 nt, synthetic construct; identical to SEQ ID NO: 673
  misc_feature 1..78: note = Synthetic
  variation 1..20: note = n is a, c, g, or u
  modified_base 1: mod_base = OTHER; note = 2'-O-methyl nucleotide, phosphorothioate linkage
  modified_base 2: mod_base = OTHER; note = 2'-O-methyl nucleotide, phosphorothioate linkage
  modified_base 3: mod_base = OTHER; note = 2'-O-methyl nucleotide, phosphorothioate linkage
  modified_base 29: mod_base = OTHER; note = 2'-O-methyl nucleotide
  modified_base 30: mod_base = OTHER; note = 2'-O-methyl nucleotide
  modified_base 31: mod_base = OTHER; note = 2'-O-methyl nucleotide
  modified_base 32: mod_base = OTHER; note = 2'-O-methyl nucleotide
  misc_feature 32..33: note = site of linker L1
  modified_base 33: mod_base = OTHER; note = 2'-O-methyl nucleotide
  modified_base 34: mod_base = OTHER; note = 2'-O-methyl nucleotide
  modified_base 35: mod_base = OTHER; note = 2'-O-methyl nucleotide
  modified_base 36: mod_base = OTHER; note = 2'-O-methyl nucleotide
  misc_feature 51..52: note = site of linker L2
  misc_feature 62..63: note = site of linker L1
  modified_base 75: mod_base = OTHER; note = phosphorothioate linkage
  modified_base 76: mod_base = OTHER; note = 2'-O-methyl nucleotide, phosphorothioate linkage
  modified_base 77: mod_base = OTHER; note = 2'-O-methyl nucleotide, phosphorothioate linkage
  modified_base 78: mod_base = OTHER; note = 2'-O-methyl nucleotide
  source 1..78: mol_type = other RNA

SEQ ID NO: 680 - RNA, 78 nt, synthetic construct; identical to SEQ ID NO: 674
  misc_feature 1..78: note = Synthetic
  variation 1..20: note = n is a, c, g, or u
  modified_base 1: mod_base = OTHER; note = 2'-O-methyl nucleotide, phosphorothioate linkage
  modified_base 2: mod_base = OTHER; note = 2'-O-methyl nucleotide, phosphorothioate linkage
  modified_base 3: mod_base = OTHER; note = 2'-O-methyl nucleotide, phosphorothioate linkage
  modified_base 29: mod_base = OTHER; note = 2'-O-methyl nucleotide
  modified_base 30: mod_base = OTHER; note = 2'-O-methyl nucleotide
  modified_base 31: mod_base = OTHER; note = 2'-O-methyl nucleotide
  misc_feature 31..32: note = site of linker L1
  modified_base 32: mod_base = OTHER; note = 2'-O-methyl nucleotide
  modified_base 33: mod_base = OTHER; note = 2'-O-methyl nucleotide
  modified_base 34: mod_base = OTHER; note = 2'-O-methyl nucleotide
  misc_feature 49..50: note = site of linker L2
  misc_feature 61..62: note = site of linker L1
  modified_base 75: mod_base = OTHER; note = phosphorothioate linkage
  modified_base 76: mod_base = OTHER; note = 2'-O-methyl nucleotide, phosphorothioate linkage
  modified_base 77: mod_base = OTHER; note = 2'-O-methyl nucleotide, phosphorothioate linkage
  modified_base 78: mod_base = OTHER; note = 2'-O-methyl nucleotide
  source 1..78: mol_type = other RNA

SEQ ID NO: 681 - RNA, 76 nt, synthetic construct; identical to SEQ ID NO: 675
  misc_feature 1..76: note = Synthetic
  variation 1..20: note = n is a, c, g, or u
  modified_base 1: mod_base = OTHER; note = 2'-O-methyl nucleotide, phosphorothioate linkage
  modified_base 2: mod_base = OTHER; note = 2'-O-methyl nucleotide, phosphorothioate linkage
  modified_base 3: mod_base = OTHER; note = 2'-O-methyl nucleotide, phosphorothioate linkage
  modified_base 29: mod_base = OTHER; note = 2'-O-methyl nucleotide
  modified_base 30: mod_base = OTHER; note = 2'-O-methyl nucleotide
  modified_base 31: mod_base = OTHER; note = 2'-O-methyl nucleotide
  misc_feature 31..32: note = site of linker L1
  modified_base 32: mod_base = OTHER; note = 2'-O-methyl nucleotide
  modified_base 33: mod_base = OTHER; note = 2'-O-methyl nucleotide
  modified_base 34: mod_base = OTHER; note = 2'-O-methyl nucleotide
  misc_feature 49..50: note = site of linker L2
  misc_feature 60..61: note = site of linker L1
  modified_base 73: mod_base = OTHER; note = phosphorothioate linkage
  modified_base 74: mod_base = OTHER; note = 2'-O-methyl nucleotide, phosphorothioate linkage
  modified_base 75: mod_base = OTHER; note = 2'-O-methyl nucleotide, phosphorothioate linkage
  modified_base 76: mod_base = OTHER; note = 2'-O-methyl nucleotide
  source 1..76: mol_type = other RNA

SEQ ID NO: 682 - RNA, 75 nt, synthetic construct
  misc_feature 1..75: note = Synthetic
  variation 1..20: note = n is a, c, g, or u
  modified_base 1: mod_base = OTHER; note = 2'-O-methyl nucleotide, phosphorothioate linkage
  modified_base 2: mod_base = OTHER; note = 2'-O-methyl nucleotide, phosphorothioate linkage
  modified_base 3: mod_base = OTHER; note = 2'-O-methyl nucleotide, phosphorothioate linkage
  modified_base 28..29: mod_base = OTHER; note = abasic site having 1',2'-dideoxyribose modification
  misc_feature 57..58: note = site of linker L1
  modified_base 72: mod_base = OTHER; note = 2'-O-methyl nucleotide, phosphorothioate linkage
  modified_base 73: mod_base = OTHER; note = 2'-O-methyl nucleotide, phosphorothioate linkage
  modified_base 74: mod_base = OTHER; note = 2'-O-methyl nucleotide, phosphorothioate linkage
  modified_base 75: mod_base = OTHER; note = 2'-O-methyl nucleotide
  source 1..75: mol_type = other RNA
nnnnnnnnnnnnnnnnnnnngttttagaaagttaaaataaggctagtccgttatcacgggcaccgagtcggtgct

SEQ ID NO: 683 - RNA, 75 nt, synthetic construct; identical to SEQ ID NO: 682
  misc_feature 1..75: note = Synthetic
  variation 1..20: note = n is a, c, g, or u
  modified_base 1: mod_base = OTHER; note = 2'-O-methyl nucleotide, phosphorothioate linkage
  modified_base 2: mod_base = OTHER; note = 2'-O-methyl nucleotide, phosphorothioate linkage
  modified_base 3: mod_base = OTHER; note = 2'-O-methyl nucleotide, phosphorothioate linkage
  misc_feature 28..29: note = site of linker L4
  misc_feature 57..58: note = site of linker L1
  modified_base 72: mod_base = OTHER; note = 2'-O-methyl nucleotide, phosphorothioate linkage
  modified_base 73: mod_base = OTHER; note = 2'-O-methyl nucleotide, phosphorothioate linkage
  modified_base 74: mod_base = OTHER; note = 2'-O-methyl nucleotide, phosphorothioate linkage
  modified_base 75: mod_base = OTHER; note = 2'-O-methyl nucleotide
  source 1..75: mol_type = other RNA

SEQ ID NO: 684 - RNA, 75 nt, synthetic construct; identical to SEQ ID NO: 682
  misc_feature 1..75: note = Synthetic
  variation 1..20: note = n is a, c, g, or u
  modified_base 1: mod_base = OTHER; note = 2'-O-methyl nucleotide, phosphorothioate linkage
  modified_base 2: mod_base = OTHER; note = 2'-O-methyl nucleotide, phosphorothioate linkage
  modified_base 3: mod_base = OTHER; note = 2'-O-methyl nucleotide, phosphorothioate linkage
  misc_feature 28..29: note = site of linker L3
  misc_feature 57..58: note = site of linker L1
  modified_base 72: mod_base = OTHER; note = 2'-O-methyl nucleotide, phosphorothioate linkage
  modified_base 73: mod_base = OTHER; note = 2'-O-methyl nucleotide, phosphorothioate linkage
  modified_base 74: mod_base = OTHER; note = 2'-O-methyl nucleotide, phosphorothioate linkage
  modified_base 75: mod_base = OTHER; note = 2'-O-methyl nucleotide
  source 1..75: mol_type = other RNA

SEQ ID NO: 685 - RNA, 75 nt, synthetic construct; identical to SEQ ID NO: 682
  misc_feature 1..75: note = Synthetic
  variation 1..20: note = n is a, c, g, or u
  modified_base 1: mod_base = OTHER; note = 2'-O-methyl nucleotide, phosphorothioate linkage
  modified_base 2: mod_base = OTHER; note = 2'-O-methyl nucleotide, phosphorothioate linkage
  modified_base 3: mod_base = OTHER; note = 2'-O-methyl nucleotide, phosphorothioate linkage
  misc_feature 28..29: note = site of linker L2
  misc_feature 57..58: note = site of linker L1
  modified_base 72: mod_base = OTHER; note = 2'-O-methyl nucleotide, phosphorothioate linkage
  modified_base 73: mod_base = OTHER; note = 2'-O-methyl nucleotide, phosphorothioate linkage
  modified_base 74: mod_base = OTHER; note = 2'-O-methyl nucleotide, phosphorothioate linkage
  modified_base 75: mod_base = OTHER; note = 2'-O-methyl nucleotide
  source 1..75: mol_type = other RNA

SEQ ID NO: 686 - RNA, 75 nt, synthetic construct; identical to SEQ ID NO: 682
  misc_feature 1..75: note = Synthetic
  variation 1..20: note = n is a, c, g, or u
  modified_base 1: mod_base = OTHER; note = 2'-O-methyl nucleotide, phosphorothioate linkage
  modified_base 2: mod_base = OTHER; note = 2'-O-methyl nucleotide, phosphorothioate linkage
  modified_base 3: mod_base = OTHER; note = 2'-O-methyl nucleotide, phosphorothioate linkage
  misc_feature 28..29: note = site of linker L1
  misc_feature 57..58: note = site of linker L1
  modified_base 72: mod_base = OTHER; note = 2'-O-methyl nucleotide, phosphorothioate linkage
  modified_base 73: mod_base = OTHER; note = 2'-O-methyl nucleotide, phosphorothioate linkage
  modified_base 74: mod_base = OTHER; note = 2'-O-methyl nucleotide, phosphorothioate linkage
  modified_base 75: mod_base = OTHER; note = 2'-O-methyl nucleotide
  source 1..75: mol_type = other RNA

SEQ ID NO: 687 - RNA, 79 nt, synthetic construct
  misc_feature 1..79: note = Synthetic
  variation 1..20: note = n is a, c, g, or u
  modified_base 1: mod_base = OTHER; note = 2'-O-methyl nucleotide, phosphorothioate linkage
  modified_base 2: mod_base = OTHER; note = 2'-O-methyl nucleotide, phosphorothioate linkage
  modified_base 3: mod_base = OTHER; note = 2'-O-methyl nucleotide, phosphorothioate linkage
  modified_base 29: mod_base = OTHER; note = 2'-O-methyl nucleotide
  modified_base 30: mod_base = OTHER; note = 2'-O-methyl nucleotide
  misc_feature 30..31: note = site of linker L1
  modified_base 31: mod_base = OTHER; note = 2'-O-methyl nucleotide
  modified_base 32: mod_base = OTHER; note = 2'-O-methyl nucleotide
  misc_feature 61..62: note = site of linker L1
  modified_base 76: mod_base = OTHER; note = 2'-O-methyl nucleotide, phosphorothioate linkage
  modified_base 77: mod_base = OTHER; note = 2'-O-methyl nucleotide, phosphorothioate linkage
  modified_base 78: mod_base = OTHER; note = 2'-O-methyl nucleotide, phosphorothioate linkage
  modified_base 79: mod_base = OTHER; note = 2'-O-methyl nucleotide
  source 1..79: mol_type = other RNA
nnnnnnnnnnnnnnnnnnnngttttagagcgcaagttaaaataaggctagtccgttatcacgggcaccgagtcggtgct

SEQ ID NO: 688 - RNA, 83 nt, synthetic construct
  misc_feature 1..83: note = Synthetic
  variation 1..20: note = n is a, c, g, or u
  modified_base 1: mod_base = OTHER; note = 2'-O-methyl nucleotide, phosphorothioate linkage
  modified_base 2: mod_base = OTHER; note = 2'-O-methyl nucleotide, phosphorothioate linkage
  modified_base 3: mod_base = OTHER; note = 2'-O-methyl nucleotide, phosphorothioate linkage
  modified_base 29: mod_base = OTHER; note = 2'-O-methyl nucleotide
  modified_base 30: mod_base = OTHER; note = 2'-O-methyl nucleotide
  modified_base 31: mod_base = OTHER; note = 2'-O-methyl nucleotide
  modified_base 32: mod_base = OTHER; note = 2'-O-methyl nucleotide
  misc_feature 32..33: note = site of linker L1
  modified_base 33: mod_base = OTHER; note = 2'-O-methyl nucleotide
  modified_base 34: mod_base = OTHER; note = 2'-O-methyl nucleotide
  modified_base 35: mod_base = OTHER; note = 2'-O-methyl nucleotide
  modified_base 36: mod_base = OTHER; note = 2'-O-methyl nucleotide
  misc_feature 65..66: note = site of linker L1
  modified_base 80: mod_base = OTHER; note = 2'-O-methyl nucleotide, phosphorothioate linkage
  modified_base 81: mod_base = OTHER; note = 2'-O-methyl nucleotide, phosphorothioate linkage
  modified_base 82: mod_base = OTHER; note = 2'-O-methyl nucleotide, phosphorothioate linkage
  modified_base 83: mod_base = OTHER; note = 2'-O-methyl nucleotide
  source 1..83: mol_type = other RNA
nnnnnnnnnnnnnnnnnnnngttttagagctatagcaagttaaaataaggctagtccgttatcacgggcaccgagtcggtgct

SEQ ID NO: 689 - RNA, 83 nt, synthetic construct; identical to SEQ ID NO: 688
  misc_feature 1..83: note = Synthetic
  variation 1..20: note = n is a, c, g, or u
  modified_base 1: mod_base = OTHER; note = 2'-O-methyl nucleotide, phosphorothioate linkage
  modified_base 2: mod_base = OTHER; note = 2'-O-methyl nucleotide, phosphorothioate linkage
  modified_base 3: mod_base = OTHER; note = 2'-O-methyl nucleotide, phosphorothioate linkage
  modified_base 29: mod_base = OTHER; note = 2'-O-methyl nucleotide
  modified_base 30: mod_base = OTHER; note = 2'-O-methyl nucleotide
  modified_base 31: mod_base = OTHER; note = 2'-O-methyl nucleotide
  modified_base 32: mod_base = OTHER; note = 2'-O-methyl nucleotide
  misc_feature 32..33: note = site of linker L1
  modified_base 33: mod_base = OTHER; note = 2'-O-methyl nucleotide
  modified_base 34: mod_base = OTHER; note = 2'-O-methyl nucleotide
  modified_base 35: mod_base = OTHER; note = 2'-O-methyl nucleotide
  modified_base 36: mod_base = OTHER; note = 2'-O-methyl nucleotide
  misc_feature 65..66: note = site of linker L1
  modified_base 77: mod_base = OTHER; note = 2'-O-methyl nucleotide
  modified_base 78: mod_base = OTHER; note = 2'-O-methyl nucleotide
  modified_base 79: mod_base = OTHER; note = 2'-O-methyl nucleotide
  modified_base 80: mod_base = OTHER; note = 2'-O-methyl nucleotide, phosphorothioate linkage
  modified_base 81: mod_base = OTHER; note = 2'-O-methyl nucleotide, phosphorothioate linkage
  modified_base 82: mod_base = OTHER; note = 2'-O-methyl nucleotide, phosphorothioate linkage
  modified_base 83: mod_base = OTHER; note = 2'-O-methyl nucleotide
  source 1..83: mol_type = other RNA

SEQ ID NO: 690-699 - skipped (10 entries)

SEQ ID NO: 700 - RNA, 146 nt, synthetic construct
  misc_feature 1..146: note = Synthetic
  variation 1..25: note = n is a, c, g, or u
  source 1..146: mol_type = other RNA
nnnnnnnnnnnnnnnnnnnnnnnnngttgtagctccctttctcatttcggaaacgaaatgagaaccgttgctacaataaggccgtctgaaaagatgtgccgcaacgctctgccccttaaagcttctgctttaaggggcatcgttta

SEQ ID NO: 701 - RNA, 146 nt, synthetic construct; identical to SEQ ID NO: 700
  misc_feature 1..146: note = Synthetic
  variation 1..25: note = n is a, c, g, or u
  variation 21..25: note = n may be present or absent
  source 1..146: mol_type = other RNA

SEQ ID NO: 702 - RNA, 102 nt, synthetic construct
  misc_feature 1..102: note = Synthetic
  variation 1..25: note = n is a, c, g, or u
  variation 21..25: note = n may be present or absent
  source 1..102: mol_type = other RNA
nnnnnnnnnnnnnnnnnnnnnnnnngttgtagctccctgaaaccgttgctacaataaggccgtcgaaagatgtgccgcaacgctctgccttctggcatcgtt

SEQ ID NO: 703 - RNA, 106 nt, synthetic construct
  misc_feature 1..106: note = Synthetic
  variation 1..25: note = n is a, c, g, or u
  variation 21..25: note = n may be present or absent
  source 1..106: mol_type = other RNA
nnnnnnnnnnnnnnnnnnnnnnnnngttgtagctcccttcgaaagaccgttgctacaataaggccgtcgaaagatgtgccgcaacgctctgccttctggcatcgtt

SEQ ID NO: 704 - RNA, 108 nt, synthetic construct
  misc_feature 1..108: note = Synthetic
  variation 1..25: note = n is a, c, g, or u
  variation 21..25: note = n may be present or absent
  source 1..108: mol_type = other RNA
nnnnnnnnnnnnnnnnnnnnnnnnngttgtagctccctggaaacccgttgctacaataaggccgtcgaaagatgtgccgcaacgctctgccttctggcatcgtttatt

SEQ ID NO: 705 - RNA, 121 nt, synthetic construct
  misc_feature 1..121: note = Synthetic
  source 1..121: mol_type = other RNA
gttgtagctccctttctcatttcggaaacgaaatgagaaccgttgctacaataaggccgtctgaaaagatgtgccgcaacgctctgccccttaaagcttctgctttaaggggcatcgttta

SEQ ID NO: 706 - RNA, 77 nt, synthetic construct
  misc_feature 1..77: note = Synthetic
  source 1..77: mol_type = other RNA
gttgtagctccctgaaaccgttgctacaataaggccgtcgaaagatgtgccgcaacgctctgccttctggcatcgtt

SEQ ID NO: 707 - RNA, 81 nt, synthetic construct
  misc_feature 1..81: note = Synthetic
  source 1..81: mol_type = other RNA
gttgtagctcccttcgaaagaccgttgctacaataaggccgtcgaaagatgtgccgcaacgctctgccttctggcatcgtt

SEQ ID NO: 708 - RNA, 83 nt, synthetic construct
  misc_feature 1..83: note = Synthetic
  source 1..83: mol_type = other RNA
gttgtagctccctggaaacccgttgctacaataaggccgtcgaaagatgtgccgcaacgctctgccttctggcatcgtttatt

SEQ ID NO: 709 - skipped

SEQ ID NO: 710 - RNA, 77 nt, synthetic construct; identical to SEQ ID NO: 706
  misc_feature 1..77: note = Synthetic
  modified_base 1: mod_base = OTHER; note = 2'-O-methyl nucleotide
  modified_base 5: mod_base = OTHER; note = 2'-O-methyl nucleotide
  modified_base 6: mod_base = OTHER; note = 2'-O-methyl nucleotide
  modified_base 7: mod_base = OTHER; note = 2'-O-methyl nucleotide
  modified_base 8: mod_base = OTHER; note = 2'-O-methyl nucleotide
  modified_base 13: mod_base = OTHER; note = 2'-O-methyl nucleotide
  modified_base 14: mod_base = OTHER; note = 2'-O-methyl nucleotide
  modified_base 15: mod_base = OTHER; note = 2'-O-methyl nucleotide
  modified_base 16: mod_base = OTHER; note = 2'-O-methyl nucleotide
  modified_base 17: mod_base = OTHER; note = 2'-O-methyl nucleotide
  modified_base 18: mod_base = OTHER; note = 2'-O-methyl nucleotide
  modified_base 19: mod_base = OTHER; note = 2'-O-methyl nucleotide
  modified_base 23: mod_base = OTHER; note = 2'-O-methyl nucleotide
  modified_base 24: mod_base = OTHER; note = 2'-O-methyl nucleotide
  modified_base 27: mod_base = OTHER; note = 2'-O-methyl nucleotide
  modified_base 30: mod_base = OTHER; note = phosphorothioate linkage
  modified_base 34: mod_base = OTHER; note = 2'-O-methyl nucleotide
  modified_base 35: mod_base = OTHER; note = 2'-O-methyl nucleotide
  modified_base 37: mod_base = OTHER; note = 2'-O-methyl nucleotide
  modified_base 38: mod_base = OTHER; note = 2'-O-methyl nucleotide
  modified_base 39: mod_base = OTHER; note = 2'-O-methyl nucleotide
  modified_base 40: mod_base = OTHER; note = 2'-O-methyl nucleotide
  modified_base 41: mod_base = OTHER; note = 2'-O-methyl nucleotide
  modified_base 42: mod_base = OTHER; note = 2'-O-methyl nucleotide
  modified_base 43: mod_base = OTHER; note = 2'-O-methyl nucleotide
  modified_base 44: mod_base = OTHER; note = 2'-O-methyl nucleotide
  modified_base 45: mod_base = OTHER; note = 2'-O-methyl nucleotide
  modified_base 46: mod_base = OTHER; note = 2'-O-methyl nucleotide
  modified_base 51: mod_base = OTHER; note = 2'-O-methyl nucleotide
  modified_base 54: mod_base = OTHER; note = 2'-O-methyl nucleotide
  modified_base 55: mod_base = OTHER; note = 2'-O-methyl nucleotide
  modified_base 56: mod_base = OTHER; note = 2'-O-methyl nucleotide
  modified_base 57: mod_base = OTHER; note = 2'-O-methyl nucleotide
  modified_base 62: mod_base = OTHER; note = 2'-O-methyl nucleotide
  modified_base 63: mod_base = OTHER; note = 2'-O-methyl nucleotide
  modified_base 65: mod_base = OTHER; note = 2'-O-methyl nucleotide
  modified_base 66: mod_base = OTHER; note = 2'-O-methyl nucleotide
  modified_base 67: mod_base = OTHER; note = 2'-O-methyl nucleotide
  modified_base 68: mod_base = OTHER; note = 2'-O-methyl nucleotide
  modified_base 70: mod_base = OTHER; note = 2'-O-methyl nucleotide
  modified_base 72: mod_base = OTHER; note = 2'-O-methyl nucleotide
  modified_base 73: mod_base = OTHER; note = 2'-O-methyl nucleotide
  modified_base 74: mod_base = OTHER; note = phosphorothioate linkage
  modified_base 75: mod_base = OTHER; note = 2'-O-methyl nucleotide, phosphorothioate linkage
  modified_base 76: mod_base = OTHER; note = 2'-O-methyl nucleotide, phosphorothioate linkage
  modified_base 77: mod_base = OTHER; note = 2'-O-methyl nucleotide
  source 1..77: mol_type = other RNA

SEQ ID NO: 711 - skipped

SEQ ID NO: 712 - RNA, 77 nt, synthetic construct; identical to SEQ ID NO: 706
  misc_feature 1..77: note = Synthetic
  modified_base 1: mod_base = OTHER; note = 2'-O-methyl nucleotide
  modified_base 5: mod_base = OTHER; note = 2'-O-methyl nucleotide
  modified_base 6: mod_base = OTHER; note = 2'-O-methyl nucleotide
  modified_base 7: mod_base = OTHER; note = 2'-O-methyl nucleotide
  modified_base 8: mod_base = OTHER; note = 2'-O-methyl nucleotide
  modified_base 13: mod_base = OTHER; note = 2'-O-methyl nucleotide
  modified_base 14: mod_base = OTHER; note = 2'-O-methyl nucleotide
  modified_base 15: mod_base = OTHER; note = 2'-O-methyl nucleotide
  modified_base 16: mod_base = OTHER; note = 2'-O-methyl nucleotide
  modified_base 17: mod_base = OTHER; note = 2'-O-methyl nucleotide
  modified_base 18: mod_base = OTHER; note = 2'-O-methyl nucleotide
  modified_base 19: mod_base = OTHER; note = 2'-O-methyl nucleotide
  modified_base 23: mod_base = OTHER; note = 2'-O-methyl nucleotide
  modified_base 24: mod_base = OTHER; note = 2'-O-methyl nucleotide
  modified_base 27: mod_base = OTHER; note = 2'-O-methyl nucleotide
  modified_base 30: mod_base = OTHER; note = phosphorothioate linkage
  modified_base 34: mod_base = OTHER; note = 2'-O-methyl nucleotide
  modified_base 35: mod_base = OTHER; note = 2'-O-methyl nucleotide
  modified_base 37: mod_base = OTHER; note = 2'-O-methyl nucleotide
  modified_base 38: mod_base = OTHER; note = 2'-O-methyl nucleotide
  modified_base 39: mod_base = OTHER; note = 2'-O-methyl nucleotide
  modified_base 40: mod_base = OTHER; note = 2'-O-methyl nucleotide
  modified_base 41: mod_base = OTHER; note = 2'-O-methyl nucleotide
  modified_base 42: mod_base = OTHER; note = 2'-O-methyl nucleotide
  modified_base 43: mod_base = OTHER; note = 2'-O-methyl nucleotide
  modified_base 44: mod_base = OTHER; note = 2'-O-methyl nucleotide
  modified_base 45: mod_base = OTHER; note = 2'-O-methyl nucleotide
  modified_base 46: mod_base = OTHER; note = 2'-O-methyl nucleotide
  modified_base 51: mod_base = OTHER; note = 2'-O-methyl nucleotide
  modified_base 53: mod_base = OTHER; note = 2'-O-methyl nucleotide
  modified_base 56: mod_base = OTHER; note = 2'-O-methyl nucleotide
  modified_base 62: mod_base = OTHER; note = 2'-O-methyl nucleotide
  modified_base 63: mod_base = OTHER; note = 2'-O-methyl nucleotide
  modified_base 65: mod_base = OTHER; note = 2'-O-methyl nucleotide
  modified_base 66: mod_base = OTHER; note = 2'-O-methyl nucleotide
  modified_base 67: mod_base = OTHER; note = 2'-O-methyl nucleotide
  modified_base 68: mod_base = OTHER; note = 2'-O-methyl nucleotide
  modified_base 75: mod_base = OTHER; note = phosphorothioate linkage
  modified_base 76: mod_base = OTHER; note = 2'-O-methyl nucleotide, phosphorothioate linkage
  modified_base 77: mod_base = OTHER; note = 2'-O-methyl nucleotide, phosphorothioate linkage
  source 1..77: mol_type = other RNA

SEQ ID NO: 713 - RNA, 77 nt, synthetic construct; identical to SEQ ID NO: 706
  misc_feature 1..77: note = Synthetic
  modified_base 1: mod_base = OTHER; note = 2'-O-methyl nucleotide
  modified_base 5: mod_base = OTHER; note = 2'-O-methyl nucleotide
  modified_base 6: mod_base = OTHER; note = 2'-O-methyl nucleotide
  modified_base 7: mod_base = OTHER; note = 2'-O-methyl nucleotide
  modified_base 8: mod_base = OTHER; note = 2'-O-methyl nucleotide
  modified_base 13: mod_base = OTHER; note = 2'-O-methyl nucleotide
  modified_base 14: mod_base = OTHER; note = 2'-O-methyl nucleotide
  modified_base 15: mod_base = OTHER; note = 2'-O-methyl nucleotide
  modified_base 16: mod_base = OTHER; note = 2'-O-methyl nucleotide
  modified_base 17: mod_base = OTHER; note = 2'-O-methyl nucleotide
  modified_base 18: mod_base = OTHER; note = 2'-O-methyl nucleotide
  modified_base 19: mod_base = OTHER; note = 2'-O-methyl nucleotide
  modified_base 23: mod_base = OTHER; note = 2'-O-methyl nucleotide
  modified_base 24: mod_base = OTHER; note = 2'-O-methyl nucleotide
  modified_base 27: mod_base = OTHER; note = 2'-O-methyl nucleotide
  modified_base 34: mod_base = OTHER; note = 2'-O-methyl nucleotide
  modified_base 35: mod_base = OTHER; note = 2'-O-methyl nucleotide
  modified_base 37: mod_base = OTHER; note = 2'-O-methyl nucleotide
  modified_base 38: mod_base = OTHER; note = 2'-O-methyl nucleotide
  modified_base 39: mod_base = OTHER; note = 2'-O-methyl nucleotide
  modified_base 40: mod_base = OTHER; note = 2'-O-methyl nucleotide
  modified_base 41: mod_base = OTHER; note = 2'-O-methyl nucleotide
  modified_base 42: mod_base = OTHER; note = 2'-O-methyl nucleotide
  modified_base 43: mod_base = OTHER; note = 2'-O-methyl nucleotide
  modified_base 44: mod_base = OTHER; note = 2'-O-methyl nucleotide
  modified_base 45: mod_base = OTHER; note = 2'-O-methyl nucleotide
  modified_base 46: mod_base = OTHER; note = 2'-O-methyl nucleotide
  modified_base 51: mod_base = OTHER; note = 2'-O-methyl nucleotide
  modified_base 53: mod_base = OTHER; note = 2'-O-methyl nucleotide
  modified_base 56: mod_base = OTHER; note = 2'-O-methyl nucleotide
  modified_base 62: mod_base = OTHER; note = 2'-O-methyl nucleotide
  modified_base 63: mod_base = OTHER; note = 2'-O-methyl nucleotide
  modified_base 65: mod_base = OTHER; note = 2'-O-methyl nucleotide
  modified_base 66: mod_base = OTHER; note = 2'-O-methyl nucleotide
  modified_base 67: mod_base = OTHER; note = 2'-O-methyl nucleotide
  modified_base 68: mod_base = OTHER; note = 2'-O-methyl nucleotide
  modified_base 75: mod_base = OTHER; note = phosphorothioate linkage
  modified_base 76: mod_base = OTHER; note = 2'-O-methyl nucleotide, phosphorothioate linkage
  modified_base 77: mod_base = OTHER; note = 2'-O-methyl nucleotide
  source 1..77: mol_type = other RNA

SEQ ID NO: 714 - RNA, 77 nt, synthetic construct; identical to SEQ ID NO: 706
  misc_feature 1..77: note = Synthetic
  modified_base 1: mod_base = OTHER; note = 2'-O-methyl nucleotide
  modified_base 5: mod_base = OTHER; note = 2'-O-methyl nucleotide
  modified_base 6: mod_base = OTHER; note = 2'-O-methyl nucleotide
  modified_base 7: mod_base = OTHER; note = 2'-O-methyl nucleotide
  modified_base 8: mod_base = OTHER; note = 2'-O-methyl nucleotide
  modified_base 13: mod_base = OTHER; note = 2'-O-methyl nucleotide
  modified_base 14: mod_base = OTHER; note = 2'-O-methyl nucleotide
  modified_base 15: mod_base = OTHER; note = 2'-O-methyl nucleotide
  modified_base 16: mod_base = OTHER; note = 2'-O-methyl nucleotide
  modified_base 17: mod_base = OTHER; note = 2'-O-methyl nucleotide
  modified_base 18: mod_base = OTHER; note = 2'-O-methyl nucleotide
  modified_base 19: mod_base = OTHER; note = 2'-O-methyl nucleotide
  modified_base 23: mod_base = OTHER; note = 2'-O-methyl nucleotide
  modified_base 24: mod_base = OTHER; note = 2'-O-methyl nucleotide
  modified_base 27: mod_base = OTHER; note = 2'-O-methyl nucleotide
  modified_base 30: mod_base = OTHER; note = phosphorothioate linkage
  modified_base 34: mod_base = OTHER; note = 2'-O-methyl nucleotide
  modified_base 35: mod_base = OTHER; note = 2'-O-methyl nucleotide
  modified_base 37: mod_base = OTHER; note = 2'-O-methyl nucleotide
  modified_base 38: mod_base = OTHER; note = 2'-O-methyl nucleotide
  modified_base 39: mod_base = OTHER; note = 2'-O-methyl nucleotide
  modified_base 40: mod_base = OTHER; note = 2'-O-methyl nucleotide
  modified_base 41: mod_base = OTHER; note = 2'-O-methyl nucleotide
  modified_base 42: mod_base = OTHER; note = 2'-O-methyl nucleotide
  modified_base 43: mod_base = OTHER; note = 2'-O-methyl nucleotide
  modified_base 44: mod_base = OTHER; note = 2'-O-methyl nucleotide
  modified_base 45: mod_base = OTHER; note = 2'-O-methyl nucleotide
  modified_base 46: mod_base = OTHER; note = 2'-O-methyl nucleotide
  modified_base 51: mod_base = OTHER; note = 2'-O-methyl nucleotide
  modified_base 53: mod_base = OTHER; note = 2'-O-methyl nucleotide
  modified_base 56: mod_base = OTHER; note = 2'-O-methyl nucleotide
  modified_base 58: mod_base = OTHER; note = 2'-O-methyl nucleotide
  modified_base 59: mod_base = OTHER; note = 2'-O-methyl nucleotide
  modified_base 60: mod_base = OTHER; note = 2'-O-methyl nucleotide
  modified_base 61: mod_base = OTHER; note = 2'-O-methyl nucleotide
  modified_base 62: mod_base = OTHER; note = 2'-O-methyl nucleotide
  modified_base 63: mod_base = OTHER; note = 2'-O-methyl nucleotide
  modified_base 65: mod_base = OTHER; note = 2'-O-methyl nucleotide
  modified_base 66: mod_base = OTHER; note = 2'-O-methyl nucleotide
  modified_base 67: mod_base = OTHER; note = 2'-O-methyl nucleotide
  modified_base 68: mod_base = OTHER; note = 2'-O-methyl nucleotide
  modified_base 75: mod_base = OTHER; note = phosphorothioate linkage
  modified_base 76: mod_base = OTHER; note = 2'-O-methyl nucleotide, phosphorothioate linkage
  modified_base 77: mod_base = OTHER; note = 2'-O-methyl nucleotide
  source 1..77: mol_type = other RNA

SEQ ID NO: 715 - RNA, 77 nt, synthetic construct; identical to SEQ ID NO: 706
  misc_feature 1..77: note = Synthetic
  modified_base 1: mod_base = OTHER; note = 2'-O-methyl nucleotide
  modified_base 5: mod_base = OTHER; note = 2'-O-methyl nucleotide
  modified_base 6: mod_base = OTHER; note = 2'-O-methyl nucleotide
  modified_base 7: mod_base = OTHER; note = 2'-O-methyl nucleotide
  modified_base 8: mod_base = OTHER; note = 2'-O-methyl nucleotide
  modified_base 13: mod_base = OTHER; note = 2'-O-methyl nucleotide
  modified_base 14: mod_base = OTHER; note = 2'-O-methyl nucleotide
  modified_base 15: mod_base = OTHER; note = 2'-O-methyl nucleotide
  modified_base 16: mod_base = OTHER; note = 2'-O-methyl nucleotide
  modified_base 17: mod_base = OTHER; note = 2'-O-methyl nucleotide
  modified_base 18: mod_base = OTHER; note = 2'-O-methyl nucleotide
  modified_base 19: mod_base = OTHER; note = 2'-O-methyl nucleotide
  modified_base 23: mod_base = OTHER; note = 2'-O-methyl nucleotide
  modified_base 24: mod_base = OTHER; note = 2'-O-methyl nucleotide
  modified_base 27: mod_base = OTHER; note = 2'-O-methyl nucleotide
  modified_base 34: mod_base = OTHER; note = 2'-O-methyl nucleotide
  modified_base 35: mod_base = OTHER; note = 2'-O-methyl nucleotide
  modified_base 37: mod_base = OTHER; note = 2'-O-methyl nucleotide
  modified_base 38: mod_base = OTHER; note = 2'-O-methyl nucleotide
  modified_base 39: mod_base = OTHER; note = 2'-O-methyl nucleotide
  modified_base 40: mod_base = OTHER; note = 2'-O-methyl nucleotide
  modified_base 41: mod_base = OTHER; note = 2'-O-methyl nucleotide
  modified_base 42: mod_base = OTHER; note = 2'-O-methyl nucleotide
  modified_base 43: mod_base = OTHER; note = 2'-O-methyl nucleotide
  modified_base 44: mod_base = OTHER; note = 2'-O-methyl nucleotide
  modified_base 45: mod_base = OTHER; note = 2'-O-methyl nucleotide
  modified_base 46: mod_base = OTHER; note = 2'-O-methyl nucleotide
  modified_base 51: mod_base = OTHER; note = 2'-O-methyl nucleotide
  modified_base 53: mod_base = OTHER; note = 2'-O-methyl nucleotide
  modified_base 56: mod_base = OTHER; note = 2'-O-methyl nucleotide
  modified_base 58: mod_base = OTHER; note = 2'-O-methyl nucleotide
  modified_base 59: mod_base = OTHER; note = 2'-O-methyl nucleotide
  modified_base 60: mod_base = OTHER; note = 2'-O-methyl nucleotide
  modified_base 61: mod_base = OTHER; note = 2'-O-methyl nucleotide
  modified_base 62: mod_base = OTHER; note = 2'-O-methyl nucleotide
  modified_base 63: mod_base = OTHER; note = 2'-O-methyl nucleotide
  modified_base 65: mod_base = OTHER; note = 2'-O-methyl nucleotide
  modified_base 66: mod_base = OTHER; note = 2'-O-methyl nucleotide
  modified_base 67: mod_base = OTHER; note = 2'-O-methyl nucleotide
  modified_base 68: mod_base = OTHER; note = 2'-O-methyl nucleotide
  modified_base 75: mod_base = OTHER; note = phosphorothioate linkage
  modified_base 76: mod_base = OTHER; note = 2'-O-methyl nucleotide, phosphorothioate linkage
  modified_base 77: mod_base = OTHER; note = 2'-O-methyl nucleotide
  source 1..77: mol_type = other RNA

SEQ ID NO: 716 - RNA, 81 nt, synthetic construct; identical to SEQ ID NO: 707
  misc_feature 1..81: note = Synthetic
  modified_base 1: mod_base = OTHER; note = 2'-O-methyl nucleotide
  modified_base 5: mod_base = OTHER; note = 2'-O-methyl nucleotide
  modified_base 6: mod_base = OTHER; note = 2'-O-methyl nucleotide
  modified_base 7: mod_base = OTHER; note = 2'-O-methyl nucleotide
  modified_base 8: mod_base = OTHER; note = 2'-O-methyl nucleotide
  modified_base 13: mod_base = OTHER; note = 2'-O-methyl nucleotide
  modified_base 14: mod_base = OTHER; note = 2'-O-methyl nucleotide
  modified_base 15: mod_base = OTHER; note = 2'-O-methyl nucleotide
  modified_base 16: mod_base = OTHER; note = 2'-O-methyl nucleotide
  modified_base 17: mod_base = OTHER; note = 2'-O-methyl nucleotide
  modified_base 18: mod_base = OTHER; note = 2'-O-methyl nucleotide
  modified_base 19: mod_base = OTHER; note = 2'-O-methyl nucleotide
  modified_base 20: mod_base = OTHER; note = 2'-O-methyl nucleotide
  modified_base 21: mod_base = OTHER; note = 2'-O-methyl nucleotide
  modified_base 22: mod_base = OTHER; note = 2'-O-methyl nucleotide
  modified_base 23: mod_base = OTHER; note = 2'-O-methyl nucleotide
  modified_base 27: mod_base = OTHER; note = 2'-O-methyl nucleotide
  modified_base 28: mod_base = OTHER; note = 2'-O-methyl nucleotide
  modified_base 31: mod_base = OTHER; note = 2'-O-methyl nucleotide
  modified_base 34: mod_base = OTHER; note = phosphorothioate linkage
  modified_base 38: mod_base = OTHER; note = 2'-O-methyl nucleotide
  modified_base 39: mod_base = OTHER; note = 2'-O-methyl nucleotide
  modified_base 41: mod_base = OTHER; note = 2'-O-methyl nucleotide
  modified_base 42: mod_base = OTHER; note = 2'-O-methyl nucleotide
  modified_base 43: mod_base = OTHER; note = 2'-O-methyl nucleotide
  modified_base 44: mod_base = OTHER; note = 2'-O-methyl nucleotide
  modified_base 45: mod_base = OTHER; note = 2'-O-methyl nucleotide
  modified_base 46: mod_base = OTHER; note = 2'-O-methyl nucleotide
  modified_base 47: mod_base = OTHER; note = 2'-O-methyl nucleotide
  modified_base 48: mod_base = OTHER; note = 2'-O-methyl nucleotide
  modified_base 49: mod_base = OTHER; note = 2'-O-methyl nucleotide
  modified_base 50: mod_base = OTHER; note = 2'-O-methyl nucleotide
  modified_base 55: mod_base = OTHER; note = 2'-O-methyl nucleotide
  modified_base 57: mod_base = OTHER; note = 2'-O-methyl nucleotide
  modified_base 60: mod_base = OTHER; note = 2'-O-methyl nucleotide
  modified_base 66: mod_base = OTHER; note = 2'-O-methyl nucleotide
  modified_base 67: mod_base = OTHER; note = 2'-O-methyl nucleotide
  modified_base 69: mod_base = OTHER; note = 2'-O-methyl nucleotide
  modified_base 70: mod_base = OTHER; note = 2'-O-methyl nucleotide
  modified_base 71: mod_base = OTHER; note = 2'-O-methyl nucleotide
  modified_base 72: mod_base = OTHER; note = 2'-O-methyl nucleotide
  modified_base 79: mod_base = OTHER; note = phosphorothioate linkage
  modified_base 80: mod_base = OTHER; note = 2'-O-methyl nucleotide, phosphorothioate linkage
  modified_base 81: mod_base = OTHER; note = 2'-O-methyl nucleotide
  source 1..81: mol_type = other RNA

SEQ ID NO: 717 - RNA, 81 nt, synthetic construct; identical to SEQ ID NO: 707
  misc_feature 1..81: note = Synthetic
  modified_base 1: mod_base = OTHER; note = 2'-O-methyl nucleotide
  modified_base 5: mod_base = OTHER; note = 2'-O-methyl nucleotide
  modified_base 6: mod_base = OTHER; note = 2'-O-methyl nucleotide
  modified_base 7: mod_base = OTHER; note = 2'-O-methyl nucleotide
  modified_base 8: mod_base = OTHER; note = 2'-O-methyl nucleotide
  modified_base 13: mod_base = OTHER; note = 2'-O-methyl nucleotide
  modified_base 14: mod_base = OTHER; note = 2'-O-methyl nucleotide
  modified_base 15: mod_base = OTHER; note = 2'-O-methyl nucleotide
  modified_base 16: mod_base = OTHER; note = 2'-O-methyl nucleotide
  modified_base 17: mod_base = OTHER; note = 2'-O-methyl nucleotide
  modified_base 18: mod_base = OTHER; note = 2'-O-methyl nucleotide
  modified_base 19: mod_base = OTHER; note = 2'-O-methyl nucleotide
  modified_base 20: mod_base = OTHER; note = 2'-O-methyl nucleotide
  modified_base 21: mod_base = OTHER; note = 2'-O-methyl nucleotide
  modified_base 22: mod_base = OTHER; note = 2'-O-methyl nucleotide
  modified_base 23: mod_base = OTHER; note = 2'-O-methyl nucleotide
  modified_base 27: mod_base = OTHER; note = 2'-O-methyl nucleotide
  modified_base 28: mod_base = OTHER; note = 2'-O-methyl nucleotide
  modified_base 31: mod_base = OTHER; note = 2'-O-methyl nucleotide
  modified_base 38: mod_base = OTHER; note = 2'-O-methyl nucleotide
  modified_base 39: mod_base = OTHER; note = 2'-O-methyl nucleotide
  modified_base 41: mod_base = OTHER; note = 2'-O-methyl nucleotide
  modified_base 42: mod_base = OTHER; note = 2'-O-methyl nucleotide
  modified_base 43: mod_base = OTHER; note = 2'-O-methyl nucleotide
  modified_base 44: mod_base = OTHER; note = 2'-O-methyl nucleotide
  modified_base 45: mod_base = OTHER; note = 2'-O-methyl nucleotide
  modified_base 46: mod_base = OTHER; note = 2'-O-methyl nucleotide
  modified_base 47: mod_base = OTHER; note = 2'-O-methyl nucleotide
  modified_base 48: mod_base = OTHER; note = 2'-O-methyl nucleotide
  modified_base 49: mod_base = OTHER; note = 2'-O-methyl nucleotide
  modified_base 50: mod_base = OTHER; note = 2'-O-methyl nucleotide
  modified_base 55: mod_base = OTHER; note = 2'-O-methyl nucleotide
  modified_base 57: mod_base = OTHER; note = 2'-O-methyl nucleotide
  modified_base 60: mod_base = OTHER; note = 2'-O-methyl nucleotide
  modified_base 66: mod_base = OTHER; note = 2'-O-methyl nucleotide
  modified_base 67: mod_base = OTHER; note = 2'-O-methyl nucleotide
  modified_base 69: mod_base = OTHER; note = 2'-O-methyl nucleotide
  modified_base 70: mod_base = OTHER; note = 2'-O-methyl nucleotide
  modified_base 71: mod_base = OTHER; note = 2'-O-methyl nucleotide
  modified_base 72: mod_base = OTHER; note = 2'-O-methyl nucleotide
  modified_base 79: mod_base = OTHER; note = phosphorothioate linkage
  modified_base 80: mod_base = OTHER; note = 2'-O-methyl nucleotide, phosphorothioate linkage
  modified_base 81: mod_base = OTHER; note = 2'-O-methyl nucleotide
  source 1..81: mol_type = other RNA

SEQ ID NO: 718 - RNA, 81 nt, synthetic construct; identical to SEQ ID NO: 707
  misc_feature 1..81: note = Synthetic
  modified_base 1: mod_base = OTHER; note = 2'-O-methyl nucleotide
  modified_base 5: mod_base = OTHER; note = 2'-O-methyl nucleotide
  modified_base 6: mod_base = OTHER; note = 2'-O-methyl nucleotide
  modified_base 7: mod_base = OTHER; note = 2'-O-methyl nucleotide
  modified_base 8: mod_base = OTHER; note = 2'-O-methyl nucleotide
  modified_base 13: mod_base = OTHER; note = 2'-O-methyl nucleotide
  modified_base 14: mod_base = OTHER; note = 2'-O-methyl nucleotide
  modified_base 15: mod_base = OTHER; note = 2'-O-methyl nucleotide
  modified_base 16: mod_base = OTHER; note = 2'-O-methyl nucleotide
  modified_base 17: mod_base = OTHER; note = 2'-O-methyl nucleotide
  modified_base 18: mod_base = OTHER; note = 2'-O-methyl nucleotide
  modified_base 19: mod_base = OTHER; note = 2'-O-methyl nucleotide
  modified_base 20: mod_base = OTHER; note = 2'-O-methyl nucleotide
  modified_base 21: mod_base = OTHER; note = 2'-O-methyl nucleotide
  modified_base 22: mod_base = OTHER; note = 2'-O-methyl nucleotide
  modified_base 23: mod_base = OTHER; note = 2'-O-methyl nucleotide
  modified_base 27: mod_base = OTHER; note = 2'-O-methyl nucleotide
  modified_base 28: mod_base = OTHER; note = 2'-O-methyl nucleotide
  modified_base 31: mod_base = OTHER; note = 2'-O-methyl nucleotide
  modified_base 34: mod_base = OTHER; note = phosphorothioate linkage
  modified_base 38: mod_base = OTHER; note = 2'-O-methyl nucleotide
  modified_base 39: mod_base = OTHER; note = 2'-O-methyl nucleotide
  modified_base 41: mod_base = OTHER; note = 2'-O-methyl nucleotide
  modified_base 42: mod_base = OTHER; note = 2'-O-methyl nucleotide
  modified_base 43: mod_base = OTHER; note = 2'-O-methyl nucleotide
  modified_base 44: mod_base = OTHER; note = 2'-O-methyl nucleotide
  modified_base 45: mod_base = OTHER; note = 2'-O-methyl nucleotide
  modified_base 46: mod_base = OTHER; note = 2'-O-methyl nucleotide
  modified_base 47: mod_base = OTHER; note = 2'-O-methyl nucleotide
  modified_base 48: mod_base = OTHER; note = 2'-O-methyl nucleotide
  modified_base 49: mod_base = OTHER; note = 2'-O-methyl nucleotide
  modified_base 50: mod_base = OTHER; note = 2'-O-methyl nucleotide
  modified_base 55: mod_base = OTHER; note = 2'-O-methyl nucleotide
  modified_base 57: mod_base = OTHER; note = 2'-O-methyl nucleotide
  modified_base 60: mod_base = OTHER; note = 2'-O-methyl nucleotide
  modified_base 62: mod_base = OTHER; note = 2'-O-methyl nucleotide
  modified_base 63: mod_base = OTHER; note = 2'-O-methyl nucleotide
  modified_base 64: mod_base = OTHER; note = 2'-O-methyl nucleotide
  modified_base 65: mod_base = OTHER; note = 2'-O-methyl nucleotide
  modified_base 66: mod_base = OTHER; note = 2'-O-methyl nucleotide
  modified_base 67: mod_base = OTHER; note = 2'-O-methyl nucleotide
  modified_base 69: mod_base = OTHER; note = 2'-O-methyl nucleotide
  modified_base 70: mod_base = OTHER; note = 2'-O-methyl nucleotide
  modified_base 71: mod_base = OTHER; note = 2'-O-methyl nucleotide
  modified_base 72: mod_base = OTHER; note = 2'-O-methyl nucleotide
  modified_base 79: mod_base = OTHER; note = phosphorothioate linkage
  modified_base 80: mod_base = OTHER; note = 2'-O-methyl nucleotide, phosphorothioate linkage
  modified_base 81: mod_base = OTHER; note = 2'-O-methyl nucleotide
  source 1..81: mol_type = other RNA

SEQ ID NO: 719 - RNA, 81 nt, synthetic construct; identical to SEQ ID NO: 707
  misc_feature 1..81: note = Synthetic
  modified_base 1: mod_base = OTHER; note = 2'-O-methyl nucleotide
  modified_base 5: mod_base = OTHER; note = 2'-O-methyl nucleotide
  modified_base 6: mod_base = OTHER; note = 2'-O-methyl nucleotide
  modified_base 7: mod_base = OTHER; note = 2'-O-methyl nucleotide
  modified_base 8: mod_base = OTHER; note = 2'-O-methyl nucleotide
  modified_base 13: mod_base = OTHER; note = 2'-O-methyl nucleotide
  modified_base 14: mod_base = OTHER; note = 2'-O-methyl nucleotide
  modified_base 15: mod_base = OTHER; note = 2'-O-methyl nucleotide
  modified_base 16: mod_base = OTHER; note = 2'-O-methyl nucleotide
  modified_base 17: mod_base = OTHER; note = 2'-O-methyl nucleotide
  modified_base 18: mod_base = OTHER; note = 2'-O-methyl nucleotide
  modified_base 19: mod_base = OTHER; note = 2'-O-methyl nucleotide
  modified_base 20: mod_base = OTHER; note = 2'-O-methyl nucleotide
  modified_base 21: mod_base = OTHER; note = 2'-O-methyl nucleotide
  modified_base 22: mod_base = OTHER; note = 2'-O-methyl nucleotide
  modified_base 23: mod_base = OTHER; note = 2'-O-methyl nucleotide
  modified_base 27: mod_base = OTHER; note = 2'-O-methyl nucleotide
  modified_base 28: mod_base = OTHER; note = 2'-O-methyl nucleotide
  modified_base 31: mod_base = OTHER; note = 2'-O-methyl nucleotide
  modified_base 38: mod_base = OTHER; note = 2'-O-methyl nucleotide
  modified_base 39: mod_base = OTHER; note = 2'-O-methyl nucleotide
  modified_base 41: mod_base = OTHER; note = 2'-O-methyl nucleotide
  modified_base 42: mod_base = OTHER; note = 2'-O-methyl nucleotide
  modified_base 43: mod_base = OTHER; note = 2'-O-methyl nucleotide
  modified_base 44: mod_base = OTHER; note = 2'-O-methyl nucleotide
  modified_base 45: mod_base = OTHER; note = 2'-O-methyl nucleotide
  modified_base 46: mod_base = OTHER; note = 2'-O-methyl nucleotide
  modified_base 47: mod_base = OTHER; note = 2'-O-methyl nucleotide
  modified_base 48: mod_base = OTHER; note = 2'-O-methyl nucleotide
  modified_base 49: mod_base = OTHER; note = 2'-O-methyl nucleotide
  modified_base 50: mod_base = OTHER; note = 2'-O-methyl nucleotide
  modified_base 55: mod_base = OTHER; note = 2'-O-methyl nucleotide
  modified_base 57: mod_base = OTHER; note = 2'-O-methyl nucleotide
  modified_base 60: mod_base = OTHER; note = 2'-O-methyl nucleotide
  modified_base 62: mod_base = OTHER; note = 2'-O-methyl nucleotide
  modified_base 63: mod_base = OTHER; note = 2'-O-methyl nucleotide
  modified_base 64: mod_base = OTHER; note = 2'-O-methyl nucleotide
  modified_base 65: mod_base = OTHER; note = 2'-O-methyl nucleotide
  modified_base 66: mod_base = OTHER; note = 2'-O-methyl nucleotide
  modified_base 67: mod_base = OTHER; note = 2'-O-methyl nucleotide
  modified_base 69: mod_base = OTHER; note = 2'-O-methyl nucleotide
  modified_base 70: mod_base = OTHER; note = 2'-O-methyl nucleotide
  modified_base 71: mod_base = OTHER; note = 2'-O-methyl nucleotide
  modified_base 72: mod_base = OTHER; note = 2'-O-methyl nucleotide
  modified_base 79: mod_base = OTHER; note = phosphorothioate linkage
  modified_base 80: mod_base = OTHER; note = 2'-O-methyl nucleotide, phosphorothioate linkage
  modified_base 81: mod_base = OTHER; note = 2'-O-methyl nucleotide
  source 1..81: mol_type = other RNA

SEQ ID NO: 720 - RNA, 101 nt, synthetic construct
  misc_feature 1..101: note = Synthetic
  variation 1..24: note = n is a, c, g, or u
  modified_base 1: mod_base = OTHER; note = 2'-O-methyl nucleotide, phosphorothioate linkage
  modified_base 2: mod_base = OTHER; note = 2'-O-methyl nucleotide
  modified_base 10: mod_base = OTHER; note = 2'-O-methyl nucleotide
  modified_base 13: mod_base = OTHER; note = 2'-O-methyl nucleotide
  modified_base 25: mod_base = OTHER; note = 2'-O-methyl nucleotide
  modified_base 29: mod_base = OTHER; note = 2'-O-methyl nucleotide
  modified_base 30: mod_base = OTHER; note = 2'-O-methyl nucleotide
  modified_base 31: mod_base = OTHER; note = 2'-O-methyl nucleotide
  modified_base 32: mod_base = OTHER; note = 2'-O-methyl nucleotide
  modified_base 37: mod_base = OTHER; note = 2'-O-methyl nucleotide
  modified_base 38: mod_base = OTHER; note = 2'-O-methyl nucleotide
  modified_base 39: mod_base = OTHER; note = 2'-O-methyl nucleotide
  modified_base 40: mod_base = OTHER; note = 2'-O-methyl nucleotide
  modified_base 41: mod_base = OTHER; note = 2'-O-methyl nucleotide
  modified_base 42: mod_base = OTHER; note = 2'-O-methyl nucleotide
  modified_base 43: mod_base = OTHER; note = 2'-O-methyl nucleotide
  modified_base 47: mod_base = OTHER; note = 2'-O-methyl nucleotide
  modified_base 48: mod_base = OTHER; note = 2'-O-methyl nucleotide
  modified_base 51: mod_base = OTHER; note = 2'-O-methyl nucleotide
  modified_base 54: mod_base = OTHER; note = phosphorothioate linkage
  modified_base 58: mod_base = OTHER; note = 2'-O-methyl nucleotide
  modified_base 59: mod_base = OTHER; note = 2'-O-methyl nucleotide
  modified_base 61: mod_base = OTHER; note = 2'-O-methyl nucleotide
  modified_base 62: mod_base = OTHER; note = 2'-O-methyl nucleotide
  modified_base 63: mod_base = OTHER; note = 2'-O-methyl nucleotide
  modified_base 64: mod_base = OTHER; note = 2'-O-methyl nucleotide
  modified_base 65: mod_base = OTHER; note = 2'-O-methyl nucleotide
  modified_base 66: mod_base = OTHER; note = 2'-O-methyl nucleotide
  modified_base 67: mod_base = OTHER; note = 2'-O-methyl nucleotide
  modified_base 68: mod_base = OTHER; note = 2'-O-methyl nucleotide
  modified_base 69: mod_base = OTHER; note = 2'-O-methyl nucleotide
  modified_base 70: mod_base = OTHER; note = 2'-O-methyl nucleotide
  modified_base 75: mod_base = OTHER; note = 2'-O-methyl nucleotide
  modified_base 78: mod_base = OTHER; note = 2'-O-methyl nucleotide
  modified_base 79: mod_base = OTHER; note = 2'-O-methyl nucleotide
  modified_base 80: mod_base = OTHER; note = 2'-O-methyl nucleotide
  modified_base 81: mod_base = OTHER; note = 2'-O-methyl nucleotide
  modified_base 86: mod_base = OTHER; note = 2'-O-methyl nucleotide
  modified_base 87: mod_base = OTHER; note = 2'-O-methyl nucleotide
  modified_base 89: mod_base = OTHER; note = 2'-O-methyl nucleotide
  modified_base 90: mod_base = OTHER; note = 2'-O-methyl nucleotide
  modified_base 91: mod_base = OTHER; note = 2'-O-methyl nucleotide
  modified_base 92: mod_base = OTHER; note = 2'-O-methyl nucleotide
  modified_base 94: mod_base = OTHER; note = 2'-O-methyl nucleotide
  modified_base 96: mod_base = OTHER; note = 2'-O-methyl nucleotide
  modified_base 97: mod_base = OTHER; note = 2'-O-methyl nucleotide
  modified_base 98: mod_base = OTHER; note = phosphorothioate linkage
  modified_base 99: mod_base = OTHER; note = 2'-O-methyl nucleotide, phosphorothioate linkage
  modified_base 100: mod_base = OTHER; note = 2'-O-methyl nucleotide, phosphorothioate linkage
  modified_base 101: mod_base = OTHER; note = 2'-O-methyl nucleotide
  source 1..101: mol_type = other RNA
nnnnnnnnnnnnnnnnnnnnnnnngttgtagctccctgaaaccgttgctacaataaggccgtcgaaagatgtgccgcaacgctctgccttctggcatcgtt

SEQ ID NO: 721 - RNA, 102 nt, synthetic construct; identical to SEQ ID NO: 702
  misc_feature 1..102: note = Synthetic
  variation 1..25: note = n is a, c, g, or u
  variation 21..25: note = n may be present or absent
  modified_base 26: mod_base = OTHER; note = 2'-O-methyl nucleotide
  modified_base 30: mod_base = OTHER; note = 2'-O-methyl nucleotide
  modified_base 31: mod_base = OTHER; note = 2'-O-methyl nucleotide
  modified_base 32: mod_base = OTHER; note = 2'-O-methyl nucleotide
  modified_base 33: mod_base = OTHER; note = 2'-O-methyl nucleotide
  modified_base 38: mod_base = OTHER; note = 2'-O-methyl nucleotide
  modified_base 39: mod_base = OTHER; note = 2'-O-methyl nucleotide
  modified_base 40: mod_base = OTHER; note = 2'-O-methyl nucleotide
  modified_base 41: mod_base = OTHER; note = 2'-O-methyl nucleotide
  modified_base 42: mod_base = OTHER; note = 2'-O-methyl nucleotide
  modified_base 43: mod_base = OTHER; note = 2'-O-methyl nucleotide
  modified_base 44: mod_base = OTHER; note = 2'-O-methyl nucleotide
  modified_base 48: mod_base = OTHER; note = 2'-O-methyl nucleotide
  modified_base 49: mod_base = OTHER; note = 2'-O-methyl nucleotide
  modified_base 52: mod_base = OTHER; note = 2'-O-methyl nucleotide
  modified_base 55: mod_base = OTHER; note = 2'-O-methyl nucleotide, phosphorothioate linkage
  modified_base 59: mod_base = OTHER; note = 2'-O-methyl nucleotide
  modified_base 60: mod_base = OTHER; note = 2'-O-methyl nucleotide
  modified_base 62: mod_base = OTHER; note = 2'-O-methyl nucleotide
  modified_base 63: mod_base = OTHER; note = 2'-O-methyl nucleotide
  modified_base 64: mod_base = OTHER; note = 2'-O-methyl nucleotide
  modified_base 65: mod_base = OTHER; note = 2'-O-methyl nucleotide
  modified_base 66: mod_base = OTHER; note = 2'-O-methyl nucleotide
  modified_base 67: mod_base = OTHER; note = 2'-O-methyl nucleotide
  modified_base 68: mod_base = OTHER; note = 2'-O-methyl nucleotide
  modified_base 69: mod_base = OTHER; note = 2'-O-methyl nucleotide
  modified_base 70: mod_base = OTHER; note = 2'-O-methyl nucleotide
  modified_base 71: mod_base = OTHER; note = 2'-O-methyl nucleotide
  modified_base 76: mod_base = OTHER; note = 2'-O-methyl nucleotide
  modified_base 78: mod_base = OTHER; note = 2'-O-methyl nucleotide
  modified_base 81: mod_base = OTHER; note = 2'-O-methyl nucleotide
  modified_base 87: mod_base = OTHER; note = 2'-O-methyl nucleotide
  modified_base 88: mod_base = OTHER; note = 2'-O-methyl nucleotide
  modified_base 90: mod_base = OTHER; note = 2'-O-methyl nucleotide
  modified_base 91: mod_base = OTHER; note = 2'-O-methyl nucleotide
  modified_base 92: mod_base = OTHER; note = 2'-O-methyl nucleotide
  modified_base 93: mod_base = OTHER; note = 2'-O-methyl nucleotide
  modified_base 100: mod_base = OTHER; note = phosphorothioate linkage
  modified_base 101: mod_base = OTHER; note = 2'-O-methyl nucleotide, phosphorothioate linkage
  modified_base 102: mod_base = OTHER; note = 2'-O-methyl nucleotide
  source 1..102: mol_type = other RNA

SEQ ID NO: 722 - RNA, 102 nt, synthetic construct; identical to SEQ ID NO: 702
  misc_feature 1..102: note = Synthetic
  variation 1..25: note = n is a, c, g, or u
  variation 21..25: note = n may be present or absent
  modified_base 26: mod_base = OTHER; note = 2'-O-methyl nucleotide
  modified_base 30: mod_base = OTHER; note = 2'-O-methyl nucleotide
  modified_base 31: mod_base = OTHER; note = 2'-O-methyl nucleotide
  modified_base 32: mod_base = OTHER; note = 2'-O-methyl nucleotide
  modified_base 33: mod_base = OTHER; note = 2'-O-methyl nucleotide
  modified_base 38: mod_base = OTHER; note = 2'-O-methyl nucleotide
  modified_base 39: mod_base = OTHER; note = 2'-O-methyl nucleotide
  modified_base 40: mod_base = OTHER; note = 2'-O-methyl nucleotide
  modified_base 41: mod_base = OTHER; note = 2'-O-methyl nucleotide
  modified_base 42: mod_base = OTHER; note = 2'-O-methyl nucleotide
  modified_base 43: mod_base = OTHER; note = 2'-O-methyl nucleotide
  modified_base 44: mod_base = OTHER; note = 2'-O-methyl nucleotide
  modified_base 48: mod_base = OTHER; note = 2'-O-methyl nucleotide
  modified_base 49: mod_base = OTHER; note = 2'-O-methyl nucleotide
  modified_base 52: mod_base = OTHER; note = 2'-O-methyl nucleotide
  modified_base 59: mod_base = OTHER; note = 2'-O-methyl nucleotide
  modified_base 60: mod_base = OTHER; note = 2'-O-methyl nucleotide
  modified_base 62: mod_base = OTHER; note = 2'-O-methyl nucleotide
  modified_base 63: mod_base = OTHER; note = 2'-O-methyl nucleotide
  modified_base 64: mod_base = OTHER; note = 2'-O-methyl nucleotide
  modified_base 65: mod_base = OTHER; note = 2'-O-methyl nucleotide
  modified_base 66: mod_base = OTHER; note = 2'-O-methyl nucleotide
  modified_base 67: mod_base = OTHER; note = 2'-O-methyl nucleotide
  modified_base 68: mod_base = OTHER; note = 2'-O-methyl nucleotide
  modified_base 69: mod_base = OTHER; note = 2'-O-methyl nucleotide
  modified_base 70: mod_base = OTHER; note = 2'-O-methyl nucleotide
  modified_base 71: mod_base = OTHER; note = 2'-O-methyl nucleotide
  modified_base 76: mod_base = OTHER; note = 2'-O-methyl nucleotide
  modified_base 78: mod_base = OTHER; note = 2'-O-methyl nucleotide
  modified_base 81: mod_base = OTHER; note = 2'-O-methyl nucleotide
  modified_base 87: mod_base = OTHER; note = 2'-O-methyl nucleotide
  modified_base 88: mod_base = OTHER; note = 2'-O-methyl nucleotide
  modified_base 90: mod_base = OTHER; note = 2'-O-methyl nucleotide
  modified_base 91: mod_base = OTHER; note = 2'-O-methyl nucleotide
  modified_base 92: mod_base = OTHER; note = 2'-O-methyl nucleotide
  modified_base 93: mod_base = OTHER; note = 2'-O-methyl nucleotide
  modified_base 100: mod_base = OTHER; note = phosphorothioate linkage
  modified_base 101: mod_base = OTHER; note = 2'-O-methyl nucleotide, phosphorothioate linkage
  modified_base 102: mod_base = OTHER; note = 2'-O-methyl nucleotide
  source 1..102: mol_type = other RNA

SEQ ID NO: 723 - RNA, 102 nt, synthetic construct; identical to SEQ ID NO: 702
  misc_feature 1..102: note = Synthetic
  variation 1..25: note = n is a, c, g, or u
  variation 21..25: note = n may be present or absent
  modified_base 26: mod_base = OTHER; note = 2'-O-methyl nucleotide
  modified_base 30: mod_base = OTHER; note = 2'-O-methyl nucleotide
  modified_base 31: mod_base = OTHER; note = 2'-O-methyl nucleotide
  modified_base 32: mod_base = OTHER; note = 2'-O-methyl nucleotide
  modified_base 33: mod_base = OTHER; note = 2'-O-methyl nucleotide
  modified_base 38: mod_base = OTHER; note = 2'-O-methyl nucleotide
  modified_base 39: mod_base = OTHER; note = 2'-O-methyl nucleotide
  modified_base 40: mod_base = OTHER; note = 2'-O-methyl nucleotide
  modified_base 41: mod_base = OTHER; note = 2'-O-methyl nucleotide
  modified_base 42: mod_base = OTHER; note = 2'-O-methyl nucleotide
  modified_base 43: mod_base = OTHER; note = 2'-O-methyl nucleotide
  modified_base 44: mod_base = OTHER; note = 2'-O-methyl nucleotide
  modified_base 48: mod_base = OTHER; note = 2'-O-methyl nucleotide
  modified_base 49: mod_base = OTHER; note = 2'-O-methyl nucleotide
  modified_base 52: mod_base = OTHER; note = 2'-O-methyl nucleotide
  modified_base 55: mod_base = OTHER; note = phosphorothioate linkage
  modified_base 59: mod_base = OTHER; note = 2'-O-methyl nucleotide
  modified_base 60: mod_base = OTHER; note = 2'-O-methyl nucleotide
  modified_base 62: mod_base = OTHER; note = 2'-O-methyl nucleotide
  modified_base 63: mod_base = OTHER; note = 2'-O-methyl nucleotide
  modified_base 64: mod_base = OTHER; note = 2'-O-methyl nucleotide
  modified_base 65: mod_base = OTHER; note = 2'-O-methyl nucleotide
  modified_base 66: mod_base = OTHER; note = 2'-O-methyl nucleotide
  modified_base 67: mod_base = OTHER; note = 2'-O-methyl nucleotide
  modified_base 68: mod_base = OTHER; note = 2'-O-methyl nucleotide
  modified_base 69: mod_base = OTHER; note = 2'-O-methyl nucleotide
  modified_base 70: mod_base = OTHER; note = 2'-O-methyl nucleotide
  modified_base 71: mod_base = OTHER; note = 2'-O-methyl nucleotide
  modified_base 76: mod_base = OTHER; note = 2'-O-methyl nucleotide
  modified_base 78: mod_base = OTHER; note = 2'-O-methyl nucleotide
  modified_base 81: mod_base = OTHER; note = 2'-O-methyl nucleotide
  modified_base 83: mod_base = OTHER; note = 2'-O-methyl nucleotide
  modified_base 84: mod_base = OTHER; note = 2'-O-methyl nucleotide
  modified_base 85: mod_base = OTHER; note = 2'-O-methyl nucleotide
  modified_base 86: mod_base = OTHER; note = 2'-O-methyl nucleotide
  modified_base 87: mod_base = OTHER; note = 2'-O-methyl nucleotide
  modified_base 88: mod_base = OTHER; note = 2'-O-methyl nucleotide
  modified_base 90: mod_base = OTHER; note = 2'-O-methyl nucleotide
  modified_base 91: mod_base = OTHER; note = 2'-O-methyl nucleotide
  modified_base 92: mod_base = OTHER; note = 2'-O-methyl nucleotide
  modified_base 93: mod_base = OTHER; note = 2'-O-methyl nucleotide
  modified_base 100: mod_base = OTHER; note = phosphorothioate linkage
  modified_base 101: mod_base = OTHER; note = 2'-O-methyl nucleotide, phosphorothioate linkage
  modified_base 102: mod_base = OTHER; note = 2'-O-methyl nucleotide
  source 1..102: mol_type = other RNA

SEQ ID NO: 724 - RNA, 102 nt, synthetic construct; identical to SEQ ID NO: 702
  misc_feature 1..102: note = Synthetic
  variation 1..25: note = n is a, c, g, or u
  variation 21..25: note = n may be present or absent
  modified_base 26: mod_base = OTHER; note = 2'-O-methyl nucleotide
  modified_base 30: mod_base = OTHER; note = 2'-O-methyl nucleotide
  modified_base 31: mod_base = OTHER; note = 2'-O-methyl nucleotide
  modified_base 32: mod_base = OTHER; note = 2'-O-methyl nucleotide
  modified_base 33: mod_base = OTHER; note = 2'-O-methyl nucleotide
  modified_base 38: mod_base = OTHER; note = 2'-O-methyl nucleotide
  modified_base 39: mod_base = OTHER; note = 2'-O-methyl nucleotide
  modified_base 40: mod_base = OTHER; note = 2'-O-methyl nucleotide
  modified_base 41: mod_base = OTHER; note = 2'-O-methyl nucleotide
  modified_base 42: mod_base = OTHER; note = 2'-O-methyl nucleotide
  modified_base 43: mod_base = OTHER; note = 2'-O-methyl nucleotide
  modified_base 44: mod_base = OTHER; note = 2'-O-methyl nucleotide
  modified_base 48: mod_base = OTHER; note = 2'-O-methyl nucleotide
  modified_base 49: mod_base = OTHER; note = 2'-O-methyl nucleotide
  modified_base 52: mod_base = OTHER; note = 2'-O-methyl nucleotide
  modified_base 59: mod_base = OTHER; note = 2'-O-methyl nucleotide
  modified_base 60: mod_base = OTHER; note = 2'-O-methyl nucleotide
  modified_base 62: mod_base = OTHER; note = 2'-O-methyl nucleotide
  modified_base 63: mod_base = OTHER; note = 2'-O-methyl nucleotide
  modified_base 64: mod_base = OTHER; note = 2'-O-methyl nucleotide
  modified_base 65: mod_base = OTHER; note = 2'-O-methyl nucleotide
  modified_base 66: mod_base = OTHER; note = 2'-O-methyl nucleotide
  modified_base 67: mod_base = OTHER; note = 2'-O-methyl nucleotide
  modified_base 68: mod_base = OTHER; note = 2'-O-methyl nucleotide
  modified_base 69: mod_base = OTHER; note = 2'-O-methyl nucleotide
  modified_base 70: mod_base = OTHER; note = 2'-O-methyl nucleotide
  modified_base 71: mod_base = OTHER; note = 2'-O-methyl nucleotide
  modified_base 76: mod_base = OTHER; note = 2'-O-methyl nucleotide
  modified_base 78: mod_base = OTHER; note = 2'-O-methyl nucleotide
  modified_base 81: mod_base = OTHER; note = 2'-O-methyl nucleotide
  modified_base 83: mod_base = OTHER; note = 2'-O-methyl nucleotide
  modified_base 84: mod_base = OTHER; note = 2'-O-methyl nucleotide
  modified_base 85: mod_base = OTHER; note = 2'-O-methyl nucleotide
  modified_base 86: mod_base = OTHER; note = 2'-O-methyl nucleotide
  modified_base 87: mod_base = OTHER; note = 2'-O-methyl nucleotide
  modified_base 88: mod_base = OTHER; note = 2'-O-methyl nucleotide
  modified_base 90: mod_base = OTHER; note = 2'-O-methyl nucleotide
  modified_base 91: mod_base = OTHER; note = 2'-O-methyl nucleotide
  modified_base 92: mod_base = OTHER; note = 2'-O-methyl nucleotide
  modified_base 93: mod_base = OTHER; note = 2'-O-methyl nucleotide
  modified_base 100: mod_base = OTHER; note = phosphorothioate linkage
  modified_base 101: mod_base = OTHER; note = 2'-O-methyl nucleotide, phosphorothioate linkage
  modified_base 102: mod_base = OTHER; note = 2'-O-methyl nucleotide
  source 1..102: mol_type = other RNA

SEQ ID NO: 725 - RNA, 106 nt, synthetic construct; identical to SEQ ID NO: 703
  misc_feature 1..106: note = Synthetic
  variation 1..25: note = n is a, c, g, or u
  variation 21..25: note = n may be present or absent
  modified_base 26: mod_base = OTHER; note = 2'-O-methyl nucleotide
  modified_base 30: mod_base = OTHER; note = 2'-O-methyl nucleotide
  modified_base 31: mod_base = OTHER; note = 2'-O-methyl nucleotide
  modified_base 32: mod_base = OTHER; note = 2'-O-methyl nucleotide
  modified_base 33: mod_base = OTHER; note = 2'-O-methyl nucleotide
  modified_base 38: mod_base = OTHER; note = 2'-O-methyl nucleotide
  modified_base 39: mod_base = OTHER; note = 2'-O-methyl nucleotide
  modified_base 40: mod_base = OTHER; note = 2'-O-methyl nucleotide
  modified_base 41: mod_base = OTHER; note = 2'-O-methyl nucleotide
  modified_base 42: mod_base = OTHER; note = 2'-O-methyl nucleotide
  modified_base 43: mod_base = OTHER; note = 2'-O-methyl nucleotide
  modified_base 44: mod_base = OTHER; note = 2'-O-methyl nucleotide
  modified_base 45: mod_base = OTHER; note = 2'-O-methyl nucleotide
  modified_base 46: mod_base = OTHER; note = 2'-O-methyl nucleotide
  modified_base 47: mod_base = OTHER; note = 2'-O-methyl nucleotide
  modified_base 48: mod_base = OTHER; note = 2'-O-methyl nucleotide
  modified_base 52: mod_base = OTHER; note = 2'-O-methyl nucleotide
  modified_base 53: mod_base = OTHER; note = 2'-O-methyl nucleotide
  modified_base 56: mod_base = OTHER; note = 2'-O-methyl nucleotide
  modified_base 59: mod_base = OTHER; note = phosphorothioate linkage
  modified_base 63: mod_base = OTHER; note = 2'-O-methyl nucleotide
  modified_base 64: mod_base = OTHER; note = 2'-O-methyl nucleotide
  modified_base 66: mod_base = OTHER; note = 2'-O-methyl nucleotide
  modified_base 67: mod_base = OTHER; note = 2'-O-methyl nucleotide
  modified_base 68: mod_base = OTHER; note = 2'-O-methyl nucleotide
  modified_base 69: mod_base = OTHER; note = 2'-O-methyl nucleotide
  modified_base 70: mod_base = OTHER; note = 2'-O-methyl nucleotide
  modified_base 71: mod_base = OTHER; note = 2'-O-methyl nucleotide
  modified_base 72: mod_base = OTHER; note = 2'-O-methyl nucleotide
  modified_base 73: mod_base = OTHER; note = 2'-O-methyl nucleotide
  modified_base 74: mod_base = OTHER; note = 2'-O-methyl nucleotide
  modified_base 75: mod_base = OTHER; note = 2'-O-methyl nucleotide
  modified_base 80: mod_base = OTHER; note = 2'-O-methyl nucleotide
  modified_base 82: mod_base = OTHER; note = 2'-O-methyl nucleotide
  modified_base 85: mod_base = OTHER; note = 2'-O-methyl nucleotide
  modified_base 91: mod_base = OTHER; note = 2'-O-methyl nucleotide
  modified_base 92: mod_base = OTHER; note = 2'-O-methyl nucleotide
  modified_base 94: mod_base = OTHER; note = 2'-O-methyl nucleotide
  modified_base 95: mod_base = OTHER; note = 2'-O-methyl nucleotide
  modified_base 96: mod_base = OTHER; note = 2'-O-methyl nucleotide
  modified_base 97: mod_base = OTHER; note = 2'-O-methyl nucleotide
  modified_base 104: mod_base = OTHER; note = phosphorothioate linkage
  modified_base 105: mod_base = OTHER; note = 2'-O-methyl nucleotide, phosphorothioate linkage
  modified_base 106: mod_base = OTHER; note = 2'-O-methyl nucleotide
  source 1..106: mol_type = other RNA

SEQ ID NO: 726 - RNA, 106 nt, synthetic construct; identical to SEQ ID NO: 703
  misc_feature 1..106: note = Synthetic
  variation 1..25: note = n is a, c, g, or u
  variation 21..25: note = n may be present or absent
  modified_base 26: mod_base = OTHER; note = 2'-O-methyl nucleotide
  modified_base 30: mod_base = OTHER; note = 2'-O-methyl nucleotide
  modified_base 31: mod_base = OTHER; note = 2'-O-methyl nucleotide
  modified_base 32: mod_base = OTHER; note = 2'-O-methyl nucleotide
  modified_base 33: mod_base = OTHER; note = 2'-O-methyl nucleotide
  modified_base 38: mod_base = OTHER; note = 2'-O-methyl nucleotide
  modified_base 39: mod_base = OTHER; note = 2'-O-methyl nucleotide
  modified_base 40: mod_base = OTHER; note = 2'-O-methyl nucleotide
  modified_base 41: mod_base = OTHER; note = 2'-O-methyl nucleotide
  modified_base 42: mod_base = OTHER; note = 2'-O-methyl nucleotide
  modified_base 43: mod_base = OTHER; note = 2'-O-methyl nucleotide
  modified_base 44: mod_base = OTHER; note = 2'-O-methyl nucleotide
  modified_base 45: mod_base = OTHER; note = 2'-O-methyl nucleotide
  modified_base 46: mod_base = OTHER; note = 2'-O-methyl nucleotide
  modified_base 47: mod_base = OTHER; note = 2'-O-methyl nucleotide
  modified_base 48: mod_base = OTHER; note = 2'-O-methyl nucleotide
  modified_base 52: mod_base = OTHER; note = 2'-O-methyl nucleotide
  modified_base 53: mod_base = OTHER; note = 2'-O-methyl nucleotide
  modified_base 56: mod_base = OTHER; note = 2'-O-methyl nucleotide
  modified_base 63: mod_base = OTHER; note = 2'-O-methyl nucleotide
  modified_base 64: mod_base = OTHER; note = 2'-O-methyl nucleotide
  modified_base 66: mod_base = OTHER; note = 2'-O-methyl nucleotide
  modified_base 67: mod_base = OTHER; note = 2'-O-methyl nucleotide
  modified_base 68: mod_base = OTHER; note = 2'-O-methyl nucleotide
  modified_base 69: mod_base = OTHER; note = 2'-O-methyl nucleotide
  modified_base 70: mod_base = OTHER; note = 2'-O-methyl nucleotide
  modified_base 71: mod_base = OTHER; note = 2'-O-methyl nucleotide
  modified_base 72: mod_base = OTHER; note = 2'-O-methyl nucleotide
  modified_base 73: mod_base = OTHER; note = 2'-O-methyl nucleotide
  modified_base 74: mod_base = OTHER; note = 2'-O-methyl nucleotide
  modified_base 75: mod_base = OTHER; note = 2'-O-methyl nucleotide
  modified_base 80: mod_base = OTHER; note = 2'-O-methyl nucleotide
  modified_base 82: mod_base = OTHER; note = 2'-O-methyl nucleotide
  modified_base 85: mod_base = OTHER; note = 2'-O-methyl nucleotide
  modified_base 91: mod_base = OTHER; note = 2'-O-methyl nucleotide
  modified_base 92: mod_base = OTHER; note = 2'-O-methyl nucleotide
  modified_base 94: mod_base = OTHER; note = 2'-O-methyl nucleotide
  modified_base 95: mod_base = OTHER; note = 2'-O-methyl nucleotide
  modified_base 96: mod_base = OTHER; note = 2'-O-methyl nucleotide
  modified_base 97: mod_base = OTHER; note = 2'-O-methyl nucleotide
  modified_base 104: mod_base = OTHER; note = phosphorothioate linkage
  modified_base 105: mod_base = OTHER; note = 2'-O-methyl nucleotide, phosphorothioate linkage
  modified_base 106: mod_base = OTHER; note = 2'-O-methyl nucleotide
  source 1..106: mol_type = other RNA

SEQ ID NO: 727 - RNA, 106 nt, synthetic construct; identical to SEQ ID NO: 703
  misc_feature 1..106: note = Synthetic
  variation 1..25: note = n is a, c, g, or u
  variation 21..25: note = n may be present or absent
  modified_base 26: mod_base = OTHER; note = 2'-O-methyl nucleotide
  modified_base 30: mod_base = OTHER; note = 2'-O-methyl nucleotide
  modified_base 31: mod_base = OTHER; note = 2'-O-methyl nucleotide
  modified_base 32: mod_base = OTHER; note = 2'-O-methyl nucleotide
  modified_base 33: mod_base = OTHER; note = 2'-O-methyl nucleotide
  modified_base 38: mod_base = OTHER; note = 2'-O-methyl nucleotide
  modified_base 39: mod_base = OTHER; note = 2'-O-methyl nucleotide
  modified_base 40: mod_base = OTHER; note = 2'-O-methyl nucleotide
  modified_base 41: mod_base = OTHER; note = 2'-O-methyl nucleotide
  modified_base 42: mod_base = OTHER; note = 2'-O-methyl nucleotide
  modified_base 43: mod_base = OTHER; note = 2'-O-methyl nucleotide
  modified_base 44: mod_base = OTHER; note = 2'-O-methyl nucleotide
  modified_base 45: mod_base = OTHER; note = 2'-O-methyl nucleotide
  modified_base 46: mod_base = OTHER; note = 2'-O-methyl nucleotide
  modified_base 47: mod_base = OTHER; note = 2'-O-methyl nucleotide
  modified_base 48: mod_base = OTHER; note = 2'-O-methyl nucleotide
  modified_base 52: mod_base = OTHER; note = 2'-O-methyl nucleotide
  modified_base 53: mod_base = OTHER; note = 2'-O-methyl nucleotide
  modified_base 56: mod_base = OTHER; note = 2'-O-methyl nucleotide
  modified_base 59: mod_base = OTHER; note = phosphorothioate linkage
  modified_base 63: mod_base = OTHER; note = 2'-O-methyl nucleotide
  modified_base 64: mod_base = OTHER; note = 2'-O-methyl nucleotide
  modified_base 66: mod_base = OTHER; note = 2'-O-methyl nucleotide
  modified_base 67: mod_base = OTHER; note = 2'-O-methyl nucleotide
  modified_base 68: mod_base = OTHER; note = 2'-O-methyl nucleotide
  modified_base 69: mod_base = OTHER; note = 2'-O-methyl nucleotide
  modified_base 70: mod_base = OTHER; note = 2'-O-methyl nucleotide
  modified_base 71: mod_base = OTHER; note = 2'-O-methyl nucleotide
  modified_base 72: mod_base = OTHER; note = 2'-O-methyl nucleotide
  modified_base 73: mod_base = OTHER; note = 2'-O-methyl nucleotide
  modified_base 74: mod_base = OTHER; note = 2'-O-methyl nucleotide
  modified_base 75: mod_base = OTHER; note = 2'-O-methyl nucleotide
  modified_base 80: mod_base = OTHER; note = 2'-O-methyl nucleotide
  modified_base 82: mod_base = OTHER; note = 2'-O-methyl nucleotide
  modified_base 85: mod_base = OTHER; note = 2'-O-methyl nucleotide
  modified_base 87: mod_base = OTHER; note = 2'-O-methyl nucleotide
  modified_base 88: mod_base = OTHER; note = 2'-O-methyl nucleotide
  modified_base 89: mod_base = OTHER; note = 2'-O-methyl nucleotide
  modified_base 90: mod_base = OTHER; note = 2'-O-methyl nucleotide
  modified_base 91: mod_base = OTHER; note = 2'-O-methyl nucleotide
  modified_base 92: mod_base = OTHER; note = 2'-O-methyl nucleotide
  modified_base 94: mod_base = OTHER; note = 2'-O-methyl nucleotide
  modified_base 95: mod_base = OTHER; note = 2'-O-methyl nucleotide
  modified_base 96: mod_base = OTHER; note = 2'-O-methyl nucleotide
  modified_base 97: mod_base = OTHER; note = 2'-O-methyl nucleotide
  modified_base 104: mod_base = OTHER; note = phosphorothioate linkage
  modified_base 105: mod_base = OTHER; note = 2'-O-methyl nucleotide, phosphorothioate linkage
  modified_base 106: mod_base = OTHER; note = 2'-O-methyl nucleotide
  source 1..106: mol_type = other RNA

SEQ ID NO: 728 - RNA, 106 nt, synthetic construct; identical to SEQ ID NO: 703
  misc_feature 1..106: note = Synthetic
  variation 1..25: note = n is a, c, g, or u
  variation 21..25: note = n may be present or absent
  modified_base 26: mod_base = OTHER; note = 2'-O-methyl nucleotide
  modified_base 30: mod_base = OTHER; note = 2'-O-methyl nucleotide
  modified_base 31: mod_base = OTHER; note = 2'-O-methyl nucleotide
  modified_base 32: mod_base = OTHER; note = 2'-O-methyl nucleotide
  modified_base 33: mod_base = OTHER; note = 2'-O-methyl nucleotide
  modified_base 38: mod_base = OTHER; note = 2'-O-methyl nucleotide
  modified_base 39: mod_base = OTHER; note = 2'-O-methyl nucleotide
  modified_base 40: mod_base = OTHER; note = 2'-O-methyl nucleotide
  modified_base 41: mod_base = OTHER; note = 2'-O-methyl nucleotide
  modified_base 42: mod_base = OTHER; note = 2'-O-methyl nucleotide
  modified_base 43: mod_base = OTHER; note = 2'-O-methyl nucleotide
  modified_base 44: mod_base = OTHER; note = 2'-O-methyl nucleotide
  modified_base 45: mod_base = OTHER; note = 2'-O-methyl nucleotide
  modified_base 46: mod_base = OTHER; note = 2'-O-methyl nucleotide
  modified_base 47: mod_base = OTHER; note = 2'-O-methyl nucleotide
  modified_base 48: mod_base = OTHER; note = 2'-O-methyl nucleotide
  modified_base 52: mod_base = OTHER; note = 2'-O-methyl nucleotide
  modified_base 53: mod_base = OTHER; note = 2'-O-methyl nucleotide
  modified_base 56: mod_base = OTHER; note = 2'-O-methyl nucleotide
  modified_base 63: mod_base = OTHER; note = 2'-O-methyl nucleotide
  modified_base 64: mod_base = OTHER; note = 2'-O-methyl nucleotide
  modified_base 66: mod_base = OTHER; note = 2'-O-methyl nucleotide
  modified_base 67: mod_base = OTHER; note = 2'-O-methyl nucleotide
  modified_base 68: mod_base = OTHER; note = 2'-O-methyl nucleotide
  modified_base 69: mod_base = OTHER; note = 2'-O-methyl nucleotide
  modified_base 70: mod_base = OTHER; note = 2'-O-methyl nucleotide
  modified_base 71: mod_base = OTHER; note = 2'-O-methyl nucleotide
  modified_base 72: mod_base = OTHER; note = 2'-O-methyl nucleotide
  modified_base 73: mod_base = OTHER; note = 2'-O-methyl nucleotide
  modified_base 74: mod_base = OTHER; note = 2'-O-methyl nucleotide
  modified_base 75: mod_base = OTHER; note = 2'-O-methyl nucleotide
  modified_base 80: mod_base = OTHER; note = 2'-O-methyl nucleotide
  modified_base 82: mod_base = OTHER; note = 2'-O-methyl nucleotide
  modified_base 85: mod_base = OTHER; note = 2'-O-methyl nucleotide
  modified_base 87: mod_base = OTHER; note = 2'-O-methyl nucleotide
  modified_base 88: mod_base = OTHER; note = 2'-O-methyl nucleotide
  modified_base 89: mod_base = OTHER; note = 2'-O-methyl nucleotide
  modified_base 90: mod_base = OTHER; note = 2'-O-methyl nucleotide
  modified_base 91: mod_base = OTHER; note = 2'-O-methyl nucleotide
  modified_base 92: mod_base = OTHER; note = 2'-O-methyl nucleotide
  modified_base 94: mod_base = OTHER; note = 2'-O-methyl nucleotide
  modified_base 95: mod_base = OTHER; note = 2'-O-methyl nucleotide
  modified_base 96: mod_base = OTHER; note = 2'-O-methyl nucleotide
  modified_base 97: mod_base = OTHER; note = 2'-O-methyl nucleotide
  modified_base 104: mod_base = OTHER; note = phosphorothioate linkage
  modified_base 105: mod_base = OTHER; note = 2'-O-methyl nucleotide, phosphorothioate linkage
  modified_base 106: mod_base = OTHER; note = 2'-O-methyl nucleotide
  source 1..106: mol_type = other RNA

SEQ ID NO: 729 - RNA, 105 nt, synthetic construct
  misc_feature 1..105: note = Synthetic
  variation 1..24: note = n is a, c, g, or u
  modified_base 1: mod_base = OTHER; note = 2'-O-methyl nucleotide, phosphorothioate linkage
  modified_base 2: mod_base = OTHER; note = 2'-O-methyl nucleotide, phosphorothioate linkage
  modified_base 3: mod_base = OTHER; note = 2'-O-methyl nucleotide, phosphorothioate linkage
  modified_base 4: mod_base = OTHER; note = 2'-O-methyl nucleotide
  modified_base 5: mod_base = OTHER; note = 2'-O-methyl nucleotide
  modified_base 8: mod_base = OTHER; note = 2'-O-methyl nucleotide
  modified_base 9: mod_base = OTHER; note = 2'-O-methyl nucleotide
  modified_base 11: mod_base = OTHER; note = 2'-O-methyl nucleotide
  modified_base 13: mod_base = OTHER; note = 2'-O-methyl nucleotide
  modified_base 18: mod_base = OTHER; note = 2'-O-methyl nucleotide
  modified_base 22: mod_base = OTHER; note = 2'-O-methyl nucleotide
  modified_base 25: mod_base = OTHER; note = 2'-O-methyl nucleotide
  modified_base 29: mod_base = OTHER; note = 2'-O-methyl nucleotide
  modified_base 30: mod_base = OTHER; note = 2'-O-methyl nucleotide
  modified_base 31: mod_base = OTHER; note = 2'-O-methyl nucleotide
  modified_base 32: mod_base = OTHER; note = 2'-O-methyl nucleotide
  modified_base 37: mod_base = OTHER; note = 2'-O-methyl nucleotide
  modified_base 38: mod_base = OTHER; note = 2'-O-methyl nucleotide
  modified_base 39: mod_base = OTHER; note = 2'-O-methyl nucleotide
  modified_base 40: mod_base = OTHER; note = 2'-O-methyl nucleotide
  modified_base 41: mod_base = OTHER; note = 2'-O-methyl nucleotide
  modified_base 42: mod_base = OTHER; note = 2'-O-methyl nucleotide
  modified_base 43: mod_base = OTHER; note = 2'-O-methyl nucleotide
  modified_base 44: mod_base = OTHER; note = 2'-O-methyl nucleotide
  modified_base 45: mod_base = OTHER; note = 2'-O-methyl nucleotide
  modified_base 46: mod_base = OTHER; note = 2'-O-methyl nucleotide
  modified_base 47: mod_base = OTHER; note = 2'-O-methyl nucleotide
  modified_base 51: mod_base = OTHER; note = 2'-O-methyl nucleotide
  modified_base 52: mod_base = OTHER; note = 2'-O-methyl nucleotide
  modified_base 55: mod_base = OTHER; note = 2'-O-methyl nucleotide
  modified_base 58: mod_base = OTHER; note = phosphorothioate linkage
  modified_base 62: mod_base = OTHER; note = 2'-O-methyl nucleotide
  modified_base 63: mod_base = OTHER; note = 2'-O-methyl nucleotide
  modified_base 65: mod_base = OTHER; note = 2'-O-methyl nucleotide
  modified_base 66: mod_base = OTHER; note = 2'-O-methyl nucleotide
  modified_base 67: mod_base = OTHER; note = 2'-O-methyl nucleotide
  modified_base 68: mod_base = OTHER; note = 2'-O-methyl nucleotide
  modified_base 69: mod_base = OTHER; note = 2'-O-methyl nucleotide
  modified_base 70: mod_base = OTHER; note = 2'-O-methyl nucleotide
  modified_base 71: mod_base = OTHER; note = 2'-O-methyl nucleotide
  modified_base 72: mod_base = OTHER; note = 2'-O-methyl nucleotide
  modified_base 73: mod_base = OTHER; note = 2'-O-methyl nucleotide
  modified_base 74: mod_base = OTHER; note = 2'-O-methyl nucleotide
  modified_base 79: mod_base = OTHER; note = 2'-O-methyl nucleotide
  modified_base 81: mod_base = OTHER; note = 2'-O-methyl nucleotide
  modified_base 84: mod_base = OTHER; note = 2'-O-methyl nucleotide
  modified_base 90: mod_base = OTHER; note = 2'-O-methyl nucleotide
  modified_base 91: mod_base = OTHER; note = 2'-O-methyl nucleotide
  modified_base 93: mod_base = OTHER; note = 2'-O-methyl nucleotide
  modified_base 94: mod_base = OTHER; note = 2'-O-methyl nucleotide
  modified_base 95: mod_base = OTHER; note = 2'-O-methyl nucleotide
  modified_base 96: mod_base = OTHER; note = 2'-O-methyl nucleotide
  modified_base 103: mod_base = OTHER; note = phosphorothioate linkage
  modified_base 104: mod_base = OTHER; note = 2'-O-methyl nucleotide, phosphorothioate linkage
  modified_base 105: mod_base = OTHER; note = 2'-O-methyl nucleotide
  source 1..105: mol_type = other RNA
nnnnnnnnnnnnnnnnnnnnnnnngttgtagctcccttcgaaagaccgttgctacaataaggccgtcgaaagatgtgccgcaacgctctgccttctggcatcgtt

SEQ ID NO: 730 - RNA, 105 nt, synthetic construct; identical to SEQ ID NO: 729
  misc_feature 1..105: note = Synthetic
  variation 1..24: note = n is a, c, g, or u
  modified_base 1: mod_base = OTHER; note = 2'-O-methyl nucleotide, phosphorothioate linkage
  modified_base 2: mod_base = OTHER; note = 2'-O-methyl nucleotide, phosphorothioate linkage
  modified_base 3: mod_base = OTHER; note = 2'-O-methyl nucleotide, phosphorothioate linkage
  modified_base 4: mod_base = OTHER; note = 2'-O-methyl nucleotide
  modified_base 5: mod_base = OTHER; note = 2'-O-methyl nucleotide
  modified_base 8: mod_base = OTHER; note = 2'-O-methyl nucleotide
  modified_base 9: mod_base = OTHER; note = 2'-O-methyl nucleotide
  modified_base 11: mod_base = OTHER; note = 2'-O-methyl nucleotide
  modified_base 13: mod_base = OTHER; note = 2'-O-methyl nucleotide
  modified_base 18: mod_base = OTHER; note = 2'-O-methyl nucleotide
  modified_base 22: mod_base = OTHER; note = 2'-O-methyl nucleotide
  modified_base 25: mod_base = OTHER; note = 2'-O-methyl nucleotide
  modified_base 29: mod_base = OTHER; note = 2'-O-methyl nucleotide
  modified_base 30: mod_base = OTHER; note = 2'-O-methyl nucleotide
  modified_base 31: mod_base = OTHER; note = 2'-O-methyl nucleotide
  modified_base 32: mod_base = OTHER; note = 2'-O-methyl nucleotide
  modified_base 37: mod_base = OTHER; note = 2'-O-methyl nucleotide
  modified_base 38: mod_base = OTHER; note = 2'-O-methyl nucleotide
  modified_base 39: mod_base = OTHER; note = 2'-O-methyl nucleotide
  modified_base 40: mod_base = OTHER; note = 2'-O-methyl nucleotide
  modified_base 41: mod_base = OTHER; note = 2'-O-methyl nucleotide
  modified_base 42: mod_base = OTHER; note = 2'-O-methyl nucleotide
  modified_base 43: mod_base = OTHER; note = 2'-O-methyl nucleotide
  modified_base 44: mod_base = OTHER; note = 2'-O-methyl nucleotide
  modified_base 45: mod_base = OTHER; note = 2'-O-methyl nucleotide
  modified_base 46: mod_base = OTHER; note = 2'-O-methyl nucleotide
  modified_base 47: mod_base = OTHER; note = 2'-O-methyl nucleotide
  modified_base 51: mod_base = OTHER; note = 2'-O-methyl nucleotide
  modified_base 52: mod_base = OTHER; note = 2'-O-methyl nucleotide
  modified_base 55: mod_base = OTHER; note = 2'-O-methyl nucleotide
  modified_base 62: mod_base = OTHER; note = 2'-O-methyl nucleotide
  modified_base 63: mod_base = OTHER; note = 2'-O-methyl nucleotide
  modified_base 65: mod_base = OTHER; note = 2'-O-methyl nucleotide
  modified_base 66: mod_base = OTHER; note = 2'-O-methyl nucleotide
  modified_base 67: mod_base = OTHER; note = 2'-O-methyl nucleotide
  modified_base 68: mod_base = OTHER; note = 2'-O-methyl nucleotide
  modified_base 69: mod_base = OTHER; note = 2'-O-methyl nucleotide
  modified_base 70: mod_base = OTHER; note = 2'-O-methyl nucleotide
  modified_base 71: mod_base = OTHER; note = 2'-O-methyl nucleotide
  modified_base 72: mod_base = OTHER; note = 2'-O-methyl nucleotide
  modified_base 73: mod_base = OTHER; note = 2'-O-methyl nucleotide
  modified_base 74: mod_base = OTHER; note = 2'-O-methyl nucleotide
  modified_base 79: mod_base = OTHER; note = 2'-O-methyl nucleotide
  modified_base 81: mod_base = OTHER; note = 2'-O-methyl nucleotide
  modified_base 84: mod_base = OTHER; note = 2'-O-methyl nucleotide
  modified_base 90: mod_base = OTHER; note = 2'-O-methyl nucleotide
  modified_base 91: mod_base = OTHER; note = 2'-O-methyl nucleotide
  modified_base 93: mod_base = OTHER; note = 2'-O-methyl nucleotide
  modified_base 94: mod_base = OTHER; note = 2'-O-methyl nucleotide
  modified_base 95: mod_base = OTHER; note = 2'-O-methyl nucleotide
  modified_base 96: mod_base = OTHER; note = 2'-O-methyl nucleotide
  modified_base 103: mod_base = OTHER; note = phosphorothioate linkage
  modified_base 104: mod_base = OTHER; note = 2'-O-methyl nucleotide, phosphorothioate linkage
  modified_base 105: mod_base = OTHER; note = 2'-O-methyl nucleotide
  source 1..105: mol_type = other RNA

SEQ ID NO: 731 - RNA, 101 nt, synthetic construct; identical to SEQ ID NO: 720
  misc_feature 1..101: note = Synthetic
  variation 1..24: note = n is a, c, g, or u
  modified_base 1: mod_base = OTHER; note = 2'-O-methyl nucleotide, phosphorothioate linkage
  modified_base 2: mod_base = OTHER; note = 2'-O-methyl nucleotide, phosphorothioate linkage
  modified_base 3: mod_base = OTHER; note = 2'-O-methyl nucleotide, phosphorothioate linkage
  modified_base 4: mod_base = OTHER; note = 2'-O-methyl nucleotide
  modified_base 5: mod_base = OTHER; note = 2'-O-methyl nucleotide
  modified_base 8: mod_base = OTHER; note = 2'-O-methyl nucleotide
  modified_base 9: mod_base = OTHER; note = 2'-O-methyl nucleotide
  modified_base 11: mod_base = OTHER; note = 2'-O-methyl nucleotide
  modified_base 13: mod_base = OTHER; note = 2'-O-methyl nucleotide
  modified_base 18: mod_base = OTHER; note = 2'-O-methyl nucleotide
  modified_base 22: mod_base = OTHER; note = 2'-O-methyl nucleotide
  modified_base 25: mod_base = OTHER; note = 2'-O-methyl nucleotide
  modified_base 29: mod_base = OTHER; note = 2'-O-methyl nucleotide
  modified_base 30: mod_base = OTHER; note = 2'-O-methyl nucleotide
  modified_base 31: mod_base = OTHER; note = 2'-O-methyl nucleotide
  modified_base 32: mod_base = OTHER; note = 2'-O-methyl nucleotide
  modified_base 37: mod_base = OTHER; note = 2'-O-methyl nucleotide
  modified_base 38: mod_base = OTHER; note = 2'-O-methyl nucleotide
  modified_base 39: mod_base = OTHER; note = 2'-O-methyl nucleotide
  modified_base 40: mod_base = OTHER; note = 2'-O-methyl nucleotide
  modified_base 41: mod_base = OTHER; note = 2'-O-methyl nucleotide
  modified_base 42: mod_base = OTHER; note = 2'-O-methyl nucleotide
  modified_base 43: mod_base = OTHER; note = 2'-O-methyl nucleotide
  modified_base 47: mod_base = OTHER; note = 2'-O-methyl nucleotide
  modified_base 48: mod_base = OTHER; note = 2'-O-methyl nucleotide
  modified_base 51: mod_base = OTHER; note = 2'-O-methyl nucleotide
  modified_base 54: mod_base = OTHER; note = phosphorothioate linkage
  modified_base 58: mod_base = OTHER; note = 2'-O-methyl nucleotide
  modified_base 59: mod_base = OTHER; note = 2'-O-methyl nucleotide
  modified_base 61: mod_base = OTHER; note = 2'-O-methyl nucleotide
  modified_base 62: mod_base = OTHER; note = 2'-O-methyl nucleotide
  modified_base 63: mod_base = OTHER; note = 2'-O-methyl nucleotide
  modified_base 64: mod_base = OTHER; note = 2'-O-methyl nucleotide
  modified_base 65: mod_base = OTHER; note = 2'-O-methyl nucleotide
  modified_base 66: mod_base = OTHER; note = 2'-O-methyl nucleotide
  modified_base 67: mod_base = OTHER; note = 2'-O-methyl nucleotide
  modified_base 68: mod_base = OTHER; note = 2'-O-methyl nucleotide
  modified_base 69: mod_base = OTHER; note = 2'-O-methyl nucleotide
  modified_base 70: mod_base = OTHER; note = 2'-O-methyl nucleotide
  modified_base 75: mod_base = OTHER; note = 2'-O-methyl nucleotide
  modified_base 77: mod_base = OTHER; note = 2'-O-methyl nucleotide
  modified_base 80: mod_base = OTHER; note = 2'-O-methyl nucleotide
  modified_base 86: mod_base = OTHER; note = 2'-O-methyl nucleotide
  modified_base 87: mod_base = OTHER; note = 2'-O-methyl nucleotide
  modified_base 89: mod_base = OTHER; note = 2'-O-methyl nucleotide
  modified_base 90: mod_base = OTHER; note = 2'-O-methyl nucleotide
  modified_base 91: mod_base = OTHER; note = 2'-O-methyl nucleotide
  modified_base 92: mod_base = OTHER; note = 2'-O-methyl nucleotide
  modified_base 99: mod_base = OTHER; note = phosphorothioate linkage
  modified_base 100: mod_base = OTHER; note = 2'-O-methyl nucleotide, phosphorothioate linkage
  modified_base 101: mod_base = OTHER; note = 2'-O-methyl nucleotide
  source 1..101: mol_type = other RNA

SEQ ID NO: 732 - RNA, 101 nt, synthetic construct; identical to SEQ ID NO: 720
  misc_feature 1..101: note = Synthetic
  variation 1..24: note = n is a, c, g, or u
  modified_base 1: mod_base = OTHER; note = 2'-O-methyl nucleotide, phosphorothioate linkage
  modified_base 2: mod_base = OTHER; note = 2'-O-methyl nucleotide, phosphorothioate linkage
  modified_base 3: mod_base = OTHER; note = 2'-O-methyl nucleotide, phosphorothioate linkage
  modified_base 4: mod_base = OTHER; note = 2'-O-methyl nucleotide
  modified_base 5: mod_base = OTHER; note = 2'-O-methyl nucleotide
  modified_base 8: mod_base = OTHER; note = 2'-O-methyl nucleotide
  modified_base 9: mod_base = OTHER; note = 2'-O-methyl nucleotide
  modified_base 11: mod_base = OTHER; note = 2'-O-methyl nucleotide
  modified_base 13: mod_base = OTHER; note = 2'-O-methyl nucleotide
  modified_base 18: mod_base = OTHER; note = 2'-O-methyl nucleotide
  modified_base 22: mod_base = OTHER; note = 2'-O-methyl nucleotide
  modified_base 25: mod_base = OTHER; note = 2'-O-methyl nucleotide
  modified_base 29: mod_base = OTHER; note = 2'-O-methyl nucleotide
  modified_base 30: mod_base = OTHER; note = 2'-O-methyl nucleotide
  modified_base 31: mod_base = OTHER; note = 2'-O-methyl nucleotide
  modified_base 32: mod_base = OTHER; note = 2'-O-methyl nucleotide
  modified_base 37: mod_base = OTHER; note = 2'-O-methyl nucleotide
  modified_base 38: mod_base = OTHER; note = 2'-O-methyl nucleotide
  modified_base 39: mod_base = OTHER; note = 2'-O-methyl nucleotide
  modified_base 40: mod_base = OTHER; note = 2'-O-methyl nucleotide
  modified_base 41: mod_base = OTHER; note = 2'-O-methyl nucleotide
  modified_base 42: mod_base = OTHER; note = 2'-O-methyl nucleotide
  modified_base 43: mod_base = OTHER; note = 2'-O-methyl nucleotide
  modified_base 47: mod_base = OTHER; note = 2'-O-methyl nucleotide
  modified_base 48: mod_base = OTHER; note = 2'-O-methyl nucleotide
  modified_base 51: mod_base = OTHER; note = 2'-O-methyl nucleotide
  modified_base 58: mod_base = OTHER; note = 2'-O-methyl nucleotide
  modified_base 59: mod_base = OTHER; note = 2'-O-methyl nucleotide
  modified_base 61: mod_base = OTHER; note = 2'-O-methyl nucleotide
  modified_base 62: mod_base = OTHER; note = 2'-O-methyl nucleotide
  modified_base 63: mod_base = OTHER; note = 2'-O-methyl nucleotide
  modified_base 64: mod_base = OTHER; note = 2'-O-methyl nucleotide
  modified_base 65: mod_base = OTHER; note = 2'-O-methyl nucleotide
  modified_base 66: mod_base = OTHER; note = 2'-O-methyl nucleotide
  modified_base 67: mod_base = OTHER; note = 2'-O-methyl nucleotide
  modified_base 68: mod_base = OTHER; note = 2'-O-methyl nucleotide
  modified_base 69: mod_base = OTHER; note = 2'-O-methyl nucleotide
  modified_base 70: mod_base = OTHER; note = 2'-O-methyl nucleotide
  modified_base 75: mod_base = OTHER; note = 2'-O-methyl nucleotide
  modified_base 77: mod_base = OTHER; note = 2'-O-methyl nucleotide
  modified_base 80: mod_base = OTHER; note = 2'-O-methyl nucleotide
  modified_base 86: mod_base = OTHER; note = 2'-O-methyl nucleotide
  modified_base 87: mod_base = OTHER; note = 2'-O-methyl nucleotide
  modified_base 89: mod_base = OTHER; note = 2'-O-methyl nucleotide
  modified_base 90: mod_base = OTHER; note = 2'-O-methyl nucleotide
  modified_base 91: mod_base = OTHER; note = 2'-O-methyl nucleotide
  modified_base 92: mod_base = OTHER; note = 2'-O-methyl nucleotide
  modified_base 99: mod_base = OTHER; note = phosphorothioate linkage
  modified_base 100: mod_base = OTHER; note = 2'-O-methyl nucleotide, phosphorothioate linkage
  modified_base 101: mod_base = OTHER; note = 2'-O-methyl nucleotide
  source 1..101: mol_type = other RNA

SEQ ID NO: 733-769 - skipped (37 entries)

SEQ ID NO: 770 - RNA, 94 nt, synthetic construct
  misc_feature 1..94: note = Synthetic
  variation 1..25: note = n is a, c, g, or u
  variation 21..25: note = n may be present or absent
  source 1..94: mol_type = other RNA
nnnnnnnnnnnnnnnnnnnnnnnnngttgtagctcccttcgaccgttgctacaataaggccgtcgatgtgccgcaacgctctgccggcatcgtt

SEQ ID NO: 771 - RNA, 93 nt, synthetic construct
  misc_feature 1..93: note = Synthetic
  variation 1..24: note = n is a, c, g, or u
  modified_base 1: mod_base = OTHER; note = 2'-O-methyl nucleotide, phosphorothioate linkage
  modified_base 2: mod_base = OTHER; note = 2'-O-methyl nucleotide, phosphorothioate linkage
  modified_base 3: mod_base = OTHER; note = 2'-O-methyl nucleotide, phosphorothioate linkage
  modified_base 4: mod_base = OTHER; note = 2'-O-methyl nucleotide
  modified_base 5: mod_base = OTHER; note = 2'-O-methyl nucleotide
  modified_base 8: mod_base = OTHER; note = 2'-O-methyl nucleotide
  modified_base 9: mod_base = OTHER; note = 2'-O-methyl nucleotide
  modified_base 11: mod_base = OTHER; note = 2'-O-methyl nucleotide
  modified_base 13: mod_base = OTHER; note = 2'-O-methyl nucleotide
  modified_base 18: mod_base = OTHER; note = 2'-O-methyl nucleotide
  modified_base 22: mod_base = OTHER; note = 2'-O-methyl nucleotide
  modified_base 25: mod_base = OTHER; note = 2'-O-methyl nucleotide
  modified_base 29: mod_base = OTHER; note = 2'-O-methyl nucleotide
  modified_base 30: mod_base = OTHER; note = 2'-O-methyl nucleotide
  modified_base 31: mod_base = OTHER; note = 2'-O-methyl nucleotide
  modified_base 32: mod_base = OTHER; note = 2'-O-methyl nucleotide
  modified_base 37: mod_base = OTHER; note = 2'-O-methyl nucleotide
  modified_base 38: mod_base = OTHER; note = 2'-O-methyl nucleotide
  modified_base 39: mod_base = OTHER; note = 2'-O-methyl nucleotide
  misc_feature 39..40: note = site of linker L1
  modified_base 40: mod_base = OTHER; note = 2'-O-methyl nucleotide
  modified_base 41: mod_base = OTHER; note = 2'-O-methyl nucleotide
  modified_base 42: mod_base = OTHER; note = 2'-O-methyl nucleotide
  modified_base 43: mod_base = OTHER; note = 2'-O-methyl nucleotide
  modified_base 47: mod_base = OTHER; note = 2'-O-methyl nucleotide
  modified_base 48: mod_base = OTHER; note = 2'-O-methyl nucleotide
  modified_base 51: mod_base = OTHER; note = 2'-O-methyl nucleotide
  modified_base 54: mod_base = OTHER; note = phosphorothioate linkage
  modified_base 58: mod_base = OTHER; note = 2'-O-methyl nucleotide
  modified_base 59: mod_base = OTHER; note = 2'-O-methyl nucleotide
  modified_base 61: mod_base = OTHER; note = 2'-O-methyl nucleotide
  modified_base 62: mod_base = OTHER; note = 2'-O-methyl nucleotide
  modified_base 63: mod_base = OTHER; note = 2'-O-methyl nucleotide
  misc_feature 63..64: note = site of linker L1
  modified_base 64: mod_base = OTHER; note = 2'-O-methyl nucleotide
  modified_base 65: mod_base = OTHER; note = 2'-O-methyl nucleotide
  modified_base 66: mod_base = OTHER; note = 2'-O-methyl nucleotide
  modified_base 71: mod_base = OTHER; note = 2'-O-methyl nucleotide
  modified_base 73: mod_base = OTHER; note = 2'-O-methyl nucleotide
  modified_base 76: mod_base = OTHER; note = 2'-O-methyl nucleotide
  modified_base 82: mod_base = OTHER; note = 2'-O-methyl nucleotide
  modified_base 83: mod_base = OTHER; note = 2'-O-methyl nucleotide
  misc_feature 84..85: note = site of linker L1
  modified_base 91: mod_base = OTHER; note = phosphorothioate linkage
  modified_base 92: mod_base = OTHER; note = 2'-O-methyl nucleotide, phosphorothioate linkage
  modified_base 93: mod_base = OTHER; note = 2'-O-methyl nucleotide
  source 1..93: mol_type = other RNA
nnnnnnnnnnnnnnnnnnnnnnnngttgtagctcccttcgaccgttgctacaataaggccgtcgatgtgccgcaacgctctgccggcatcgtt

SEQ ID NO: 772 - RNA, 89 nt, synthetic construct
  misc_feature 1..89: note = Synthetic
  variation 1..24: note = n is a, c, g, or u
  modified_base 1: mod_base = OTHER; note = 2'-O-methyl nucleotide, phosphorothioate linkage
  modified_base 2: mod_base = OTHER; note = 2'-O-methyl nucleotide, phosphorothioate linkage
  modified_base 3: mod_base = OTHER; note = 2'-O-methyl nucleotide, phosphorothioate linkage
  modified_base 4: mod_base = OTHER; note = 2'-O-methyl nucleotide
  modified_base 5: mod_base = OTHER; note = 2'-O-methyl nucleotide
  modified_base 8: mod_base = OTHER; note = 2'-O-methyl nucleotide
  modified_base 9: mod_base = OTHER; note = 2'-O-methyl nucleotide
  modified_base 11: mod_base = OTHER; note = 2'-O-methyl nucleotide
  modified_base 13: mod_base = OTHER; note = 2'-O-methyl nucleotide
  modified_base 18: mod_base = OTHER; note = 2'-O-methyl nucleotide
  modified_base 22: mod_base = OTHER; note = 2'-O-methyl nucleotide
  modified_base 25: mod_base = OTHER; note = 2'-O-methyl nucleotide
  modified_base 29: mod_base = OTHER; note = 2'-O-methyl nucleotide
  modified_base 30: mod_base = OTHER; note = 2'-O-methyl nucleotide
  modified_base 31: mod_base = OTHER; note = 2'-O-methyl nucleotide
  modified_base 32: mod_base = OTHER; note = 2'-O-methyl nucleotide
  modified_base 37: mod_base = OTHER; note = 2'-O-methyl nucleotide
  misc_feature 37..38: note = site of linker L1
  modified_base 38: mod_base = OTHER; note = 2'-O-methyl nucleotide
  modified_base 39: mod_base = OTHER; note = 2'-O-methyl nucleotide
  modified_base 43: mod_base = OTHER; note = 2'-O-methyl nucleotide
  modified_base 44: mod_base = OTHER; note = 2'-O-methyl nucleotide
  modified_base 47: mod_base = OTHER; note = 2'-O-methyl nucleotide
  modified_base 50: mod_base = OTHER; note = phosphorothioate linkage
  modified_base 54: mod_base = OTHER; note = 2'-O-methyl nucleotide
  modified_base 55: mod_base = OTHER; note = 2'-O-methyl nucleotide
  modified_base 57: mod_base = OTHER; note = 2'-O-methyl nucleotide
  modified_base 58: mod_base = OTHER; note = 2'-O-methyl nucleotide
  modified_base 59: mod_base = OTHER; note = 2'-O-methyl nucleotide
  misc_feature 59..60: note = site of linker L1
  modified_base 60: mod_base = OTHER; note = 2'-O-methyl nucleotide
  modified_base 61: mod_base = OTHER; note = 2'-O-methyl nucleotide
  modified_base 62: mod_base = OTHER; note = 2'-O-methyl nucleotide
  modified_base 67: mod_base = OTHER; note = 2'-O-methyl nucleotide
  modified_base 69: mod_base = OTHER; note = 2'-O-methyl nucleotide
  modified_base 72: mod_base = OTHER; note = 2'-O-methyl nucleotide
  modified_base 78: mod_base = OTHER; note = 2'-O-methyl nucleotide
  modified_base 79: mod_base = OTHER; note = 2'-O-methyl nucleotide
  misc_feature 80: note = site of linker L1
  modified_base 87: mod_base = OTHER; note = phosphorothioate linkage
  modified_base 88: mod_base = OTHER; note = 2'-O-methyl nucleotide, phosphorothioate linkage
  modified_base 89: mod_base = OTHER; note = 2'-O-methyl nucleotide
  source 1..89: mol_type = other RNA
nnnnnnnnnnnnnnnnnnnnnnnngttgtagctccctccgttgctacaataaggccgtcgatgtgccgcaacgctctgccggcatcgtt

SEQ ID NO: 773 - RNA, 89 nt, synthetic construct; identical to SEQ ID NO: 772
  misc_feature 1..89: note = Synthetic
  variation 1..24: note = n is a, c, g, or u
  modified_base 25: mod_base = OTHER; note = 2'-O-methyl nucleotide
  modified_base 29: mod_base = OTHER; note = 2'-O-methyl nucleotide
  modified_base 30: mod_base = OTHER; note = 2'-O-methyl nucleotide
  modified_base 31: mod_base = OTHER; note = 2'-O-methyl nucleotide
  modified_base 32: mod_base = OTHER; note = 2'-O-methyl nucleotide
  modified_base 37: mod_base = OTHER; note = 2'-O-methyl nucleotide
  misc_feature 37..38: note = site of linker L1
  modified_base 38: mod_base = OTHER; note = 2'-O-methyl nucleotide
  modified_base 39: mod_base = OTHER; note = 2'-O-methyl nucleotide
  modified_base 43: mod_base = OTHER; note = 2'-O-methyl nucleotide
  modified_base 44: mod_base = OTHER; note = 2'-O-methyl nucleotide
  modified_base 47: mod_base = OTHER; note = 2'-O-methyl nucleotide
  modified_base 50: mod_base = OTHER; note = phosphorothioate linkage
  modified_base 54: mod_base = OTHER; note = 2'-O-methyl nucleotide
  modified_base 55: mod_base = OTHER; note = 2'-O-methyl nucleotide
  modified_base 57: mod_base = OTHER; note = 2'-O-methyl nucleotide
  modified_base 58: mod_base = OTHER; note = 2'-O-methyl nucleotide
  modified_base 59: mod_base = OTHER; note = 2'-O-methyl nucleotide
  misc_feature 59..60: note = site of linker L1
  modified_base 60: mod_base = OTHER; note = 2'-O-methyl nucleotide
  modified_base 61: mod_base = OTHER; note = 2'-O-methyl nucleotide
  modified_base 62: mod_base = OTHER; note = 2'-O-methyl nucleotide
  modified_base 67: mod_base = OTHER; note = 2'-O-methyl nucleotide
  modified_base 69: mod_base = OTHER; note = 2'-O-methyl nucleotide
  modified_base 72: mod_base = OTHER; note = 2'-O-methyl nucleotide
  modified_base 78: mod_base = OTHER; note = 2'-O-methyl nucleotide
  modified_base 79: mod_base = OTHER; note = 2'-O-methyl nucleotide
  misc_feature 80: note = site of linker L1
  modified_base 87: mod_base = OTHER; note = phosphorothioate linkage
  modified_base 88: mod_base = OTHER; note = 2'-O-methyl nucleotide, phosphorothioate linkage
  modified_base 89: mod_base = OTHER; note = 2'-O-methyl nucleotide
  source 1..89: mol_type = other RNA

SEQ ID NO: 774 - RNA, 90 nt, synthetic construct
  misc_feature 1..90: note = Synthetic
  variation 1..25: note = n is a, c, g, or u
  variation 21..25: note = n may be present or absent
  modified_base 30: mod_base = OTHER; note = 2'-O-methyl nucleotide
  modified_base 31: mod_base = OTHER; note = 2'-O-methyl nucleotide
  modified_base 32: mod_base = OTHER; note = 2'-O-methyl nucleotide
  modified_base 33: mod_base = OTHER; note = 2'-O-methyl nucleotide
  modified_base 38: mod_base = OTHER; note = 2'-O-methyl nucleotide
  misc_feature 38..39: note = site of linker L1
  modified_base 39: mod_base = OTHER; note = 2'-O-methyl nucleotide
  modified_base 40: mod_base = OTHER; note = 2'-O-methyl nucleotide
  modified_base 44: mod_base = OTHER; note = 2'-O-methyl nucleotide
  modified_base 45: mod_base = OTHER; note = 2'-O-methyl nucleotide
  modified_base 48: mod_base = OTHER; note = 2'-O-methyl nucleotide
  modified_base 51: mod_base = OTHER; note = phosphorothioate linkage
  modified_base 55: mod_base = OTHER; note = 2'-O-methyl nucleotide
  modified_base 56: mod_base = OTHER; note = 2'-O-methyl nucleotide
  modified_base 58: mod_base = OTHER; note = 2'-O-methyl nucleotide
  modified_base 59: mod_base = OTHER; note = 2'-O-methyl nucleotide
  modified_base 60: mod_base = OTHER; note = 2'-O-methyl nucleotide
  misc_feature 60..61: note = site of linker L1
  modified_base 61: mod_base = OTHER; note = 2'-O-methyl nucleotide
  modified_base 62: mod_base = OTHER; note = 2'-O-methyl nucleotide
  modified_base 63: mod_base = OTHER; note = 2'-O-methyl nucleotide
  modified_base 68: mod_base = OTHER; note = 2'-O-methyl nucleotide
  modified_base 70: mod_base = OTHER; note = 2'-O-methyl nucleotide
  modified_base 73: mod_base = OTHER; note = 2'-O-methyl nucleotide
  modified_base 79: mod_base = OTHER; note = 2'-O-methyl nucleotide
  modified_base 80: mod_base = OTHER; note = 2'-O-methyl nucleotide
  misc_feature 81..82: note = site of linker L1
  modified_base 88: mod_base = OTHER; note = phosphorothioate linkage
  modified_base 89: mod_base = OTHER; note = 2'-O-methyl nucleotide, phosphorothioate linkage
  modified_base 90: mod_base = OTHER; note = 2'-O-methyl nucleotide
  source 1..90: mol_type = other RNA
nnnnnnnnnnnnnnnnnnnnnnnnngttgtagctccctccgttgctacaataaggccgtcgatgtgccgcaacgctctgccggcatcgtt

SEQ ID NO: 775 - RNA, 94 nt, synthetic construct
  misc_feature 1..94: note = Synthetic
  variation 1..25: note = n is a, c, g, or u
  variation 21..25: note = n may be present or absent
  modified_base 30: mod_base = OTHER; note = 2'-O-methyl nucleotide
  modified_base 31: mod_base = OTHER; note = 2'-O-methyl nucleotide
  modified_base 32: mod_base = OTHER; note = 2'-O-methyl nucleotide
  modified_base 33: mod_base = OTHER; note = 2'-O-methyl nucleotide
  modified_base 38: mod_base = OTHER; note = 2'-O-methyl nucleotide
  modified_base 39: mod_base = OTHER; note = 2'-O-methyl nucleotide
  modified_base 40: mod_base = OTHER; note = 2'-O-methyl nucleotide
  misc_feature 40..41: note = site of linker L1
  modified_base 41: mod_base = OTHER; note = 2'-O-methyl nucleotide
  modified_base 42: mod_base = OTHER; note = 2'-O-methyl nucleotide
  modified_base 43: mod_base = OTHER; note = 2'-O-methyl nucleotide
  modified_base 44: mod_base = OTHER; note = 2'-O-methyl nucleotide
  modified_base 48: mod_base = OTHER; note = 2'-O-methyl nucleotide
  modified_base 49: mod_base = OTHER; note = 2'-O-methyl nucleotide
  modified_base 52: mod_base = OTHER; note = 2'-O-methyl nucleotide
  modified_base 55: mod_base = OTHER; note = phosphorothioate linkage
  modified_base 59: mod_base = OTHER; note = 2'-O-methyl nucleotide
  modified_base 60: mod_base = OTHER; note = 2'-O-methyl nucleotide
  modified_base 62: mod_base = OTHER; note = 2'-O-methyl nucleotide
  modified_base 63: mod_base = OTHER; note = 2'-O-methyl nucleotide
  modified_base 64: mod_base = OTHER; note = 2'-O-methyl nucleotide
  misc_feature 64..65: note = site of linker L1
  modified_base 65: mod_base = OTHER; note = 2'-O-methyl nucleotide
  modified_base 66: mod_base = OTHER; note = 2'-O-methyl nucleotide
  modified_base 67: mod_base = OTHER; note = 2'-O-methyl nucleotide
  modified_base 72: mod_base = OTHER; note = 2'-O-methyl nucleotide
  modified_base 74: mod_base = OTHER; note = 2'-O-methyl nucleotide
  modified_base 77: mod_base = OTHER; note = 2'-O-methyl nucleotide
  modified_base 83: mod_base = OTHER; note = 2'-O-methyl nucleotide
  modified_base 84: mod_base = OTHER; note = 2'-O-methyl nucleotide
  misc_feature 85..86: note = site of linker L1
  modified_base 93: mod_base = OTHER; note = 2'-O-methyl nucleotide, phosphorothioate linkage
  modified_base 94: mod_base = OTHER; note = 2'-O-methyl nucleotide
  source 1..94: mol_type = other RNA
nnnnnnnnnnnnnnnnnnnnnnnnngttgtagctcccttgcaccgttgctacaataaggccgtcgatgtgccgcaacgctctgccggcatcgtt

SEQ ID NO: 776 - RNA, 94 nt, synthetic construct; identical to SEQ ID NO: 775
  misc_feature 1..94: note = Synthetic
  variation 1..25: note = n is a, c, g, or u
  variation 21..25: note = n may be present or absent
  modified_base 30: mod_base = OTHER; note = 2'-O-methyl nucleotide
  modified_base 31: mod_base = OTHER; note = 2'-O-methyl nucleotide
  modified_base 32: mod_base = OTHER; note = 2'-O-methyl nucleotide
  modified_base 33: mod_base = OTHER; note = 2'-O-methyl nucleotide
  modified_base 38: mod_base = OTHER; note = 2'-O-methyl nucleotide
  modified_base 39: mod_base = OTHER; note = 2'-O-methyl nucleotide
  modified_base 40: mod_base = OTHER; note = 2'-O-methyl nucleotide
  misc_feature 40..41: note = site of linker L1
  modified_base 41: mod_base = OTHER; note = 2'-O-methyl nucleotide
  modified_base 42: mod_base = OTHER; note = 2'-O-methyl nucleotide
  modified_base 43: mod_base = OTHER; note = 2'-O-methyl nucleotide
  modified_base 44: mod_base = OTHER; note = 2'-O-methyl nucleotide
  modified_base 48: mod_base = OTHER; note = 2'-O-methyl nucleotide
  modified_base 49: mod_base = OTHER; note = 2'-O-methyl nucleotide
  modified_base 52: mod_base = OTHER; note = 2'-O-methyl nucleotide
  modified_base 55: mod_base = OTHER; note = phosphorothioate linkage
  modified_base 59: mod_base = OTHER; note = 2'-O-methyl nucleotide
  modified_base 60: mod_base = OTHER; note = 2'-O-methyl nucleotide
  modified_base 62: mod_base = OTHER; note = 2'-O-methyl nucleotide
  modified_base 63: mod_base = OTHER; note = 2'-O-methyl nucleotide
  modified_base 64: mod_base = OTHER; note = 2'-O-methyl nucleotide
  misc_feature 64..65: note = site of linker L1
  modified_base 65: mod_base = OTHER; note = 2'-O-methyl nucleotide
  modified_base 66: mod_base = OTHER; note = 2'-O-methyl nucleotide
  modified_base 67: mod_base = OTHER; note = 2'-O-methyl nucleotide
  modified_base 72: mod_base = OTHER; note = 2'-O-methyl nucleotide
  modified_base 74: mod_base = OTHER; note = 2'-O-methyl nucleotide
  modified_base 77: mod_base = OTHER; note = 2'-O-methyl nucleotide
  modified_base 83: mod_base = OTHER; note = 2'-O-methyl nucleotide
  modified_base 84: mod_base = OTHER; note = 2'-O-methyl nucleotide
  misc_feature 85..86: note = site of linker L1
  modified_base 93: mod_base = OTHER; note = 2'-O-methyl nucleotide, phosphorothioate linkage
  modified_base 94: mod_base = OTHER; note = 2'-O-methyl nucleotide
  source 1..94: mol_type = other RNA

SEQ ID NO: 777 - RNA, 92 nt, synthetic construct
  misc_feature 1..92: note = Synthetic
  variation 1..25: note = n is a, c, g, or u
  variation 21..25: note = n may be present or absent
  modified_base 30: mod_base = OTHER; note = 2'-O-methyl nucleotide
  modified_base 31: mod_base = OTHER; note = 2'-O-methyl nucleotide
  modified_base 32: mod_base = OTHER; note = 2'-O-methyl nucleotide
  modified_base 33: mod_base = OTHER; note = 2'-O-methyl nucleotide
  modified_base 38: mod_base = OTHER; note = 2'-O-methyl nucleotide
  modified_base 39: mod_base = OTHER; note = 2'-O-methyl nucleotide
  misc_feature 39..40: note = site of linker L1
  modified_base 40: mod_base = OTHER; note = 2'-O-methyl nucleotide
  modified_base 41: mod_base = OTHER; note = 2'-O-methyl nucleotide
  modified_base 42: mod_base = OTHER; note = 2'-O-methyl nucleotide
  modified_base 46: mod_base = OTHER; note = 2'-O-methyl nucleotide
  modified_base 47: mod_base = OTHER; note = 2'-O-methyl nucleotide
  modified_base 50: mod_base = OTHER; note = 2'-O-methyl nucleotide
  modified_base 53: mod_base = OTHER; note = phosphorothioate linkage
  modified_base 57: mod_base = OTHER; note = 2'-O-methyl nucleotide
  modified_base 58: mod_base = OTHER; note = 2'-O-methyl nucleotide
  modified_base 60: mod_base = OTHER; note = 2'-O-methyl nucleotide
  modified_base 61: mod_base = OTHER; note = 2'-O-methyl nucleotide
  modified_base 62: mod_base = OTHER; note = 2'-O-methyl nucleotide
  misc_feature 62..63: note = site of linker L1
  modified_base 63: mod_base = OTHER; note = 2'-O-methyl nucleotide
  modified_base 64: mod_base = OTHER; note = 2'-O-methyl nucleotide
  modified_base 65: mod_base = OTHER; note = 2'-O-methyl nucleotide
  modified_base 70: mod_base = OTHER; note = 2'-O-methyl nucleotide
  modified_base 72: mod_base = OTHER; note = 2'-O-methyl nucleotide
  modified_base 75: mod_base = OTHER; note = 2'-O-methyl nucleotide
  modified_base 81: mod_base = OTHER; note = 2'-O-methyl nucleotide
  modified_base 82: mod_base = OTHER; note = 2'-O-methyl nucleotide
  misc_feature 83..84: note = site of linker L1
  modified_base 91: mod_base = OTHER; note = 2'-O-methyl nucleotide, phosphorothioate linkage
  modified_base 92: mod_base = OTHER; note = 2'-O-methyl nucleotide
  source 1..92: mol_type = other RNA
nnnnnnnnnnnnnnnnnnnnnnnnngttgtagctccctgcccgttgctacaataaggccgtcgatgtgccgcaacgctctgccggcatcgtt

SEQ ID NO: 778 - RNA, 90 nt, synthetic construct
  misc_feature 1..90: note = Synthetic
  variation 1..25: note = n is a, c, g, or u
  variation 21..25: note = n may be present or absent
  modified_base 30: mod_base = OTHER; note = 2'-O-methyl nucleotide
  modified_base 31: mod_base = OTHER; note = 2'-O-methyl nucleotide
  modified_base 32: mod_base = OTHER; note = 2'-O-methyl nucleotide
  modified_base 33: mod_base = OTHER; note = 2'-O-methyl nucleotide
  modified_base 38..39: mod_base = OTHER; note = 2'-O-methyl nucleotide
  misc_feature 38..39: note = site of linker L1
  modified_base 39: mod_base = OTHER; note = 2'-O-methyl nucleotide
  modified_base 40: mod_base = OTHER; note = 2'-O-methyl nucleotide
  modified_base 44: mod_base = OTHER; note = 2'-O-methyl nucleotide
  modified_base 45: mod_base = OTHER; note = 2'-O-methyl nucleotide
  modified_base 48: mod_base = OTHER; note = 2'-O-methyl nucleotide
  modified_base 51: mod_base = OTHER; note = phosphorothioate linkage
  modified_base 55: mod_base = OTHER; note = 2'-O-methyl nucleotide
  modified_base 56: mod_base = OTHER; note = 2'-O-methyl nucleotide
  modified_base 58: mod_base = OTHER; note = 2'-O-methyl nucleotide
  modified_base 59: mod_base = OTHER; note = 2'-O-methyl nucleotide
  modified_base 60: mod_base = OTHER; note = 2'-O-methyl nucleotide
  misc_feature 60..61: note = site of linker L1
  modified_base 61: mod_base = OTHER; note = 2'-O-methyl nucleotide
  modified_base 62: mod_base = OTHER; note = 2'-O-methyl nucleotide
  modified_base 63: mod_base = OTHER; note = 2'-O-methyl nucleotide
  modified_base 68: mod_base = OTHER; note = 2'-O-methyl nucleotide
  modified_base 70: mod_base = OTHER; note = 2'-O-methyl nucleotide
  modified_base 73: mod_base = OTHER; note = 2'-O-methyl nucleotide
  modified_base 79: mod_base = OTHER; note = 2'-O-methyl nucleotide
  modified_base 80: mod_base = OTHER; note = 2'-O-methyl nucleotide
  misc_feature 81..82: note = site of linker L1
  modified_base 89: mod_base = OTHER; note = 2'-O-methyl nucleotide, phosphorothioate linkage
  modified_base 90: mod_base = OTHER; note = 2'-O-methyl nucleotide
  source 1..90: mol_type = other RNA
nnnnnnnnnnnnnnnnnnnnnnnnngttgtagctcccgccgttgctacaataaggccgtcgatgtgccgcaacgctctgccggcatcgtt

SEQ ID NO: 779 - RNA, 88 nt, synthetic construct
  misc_feature 1..88: note = Synthetic
  variation 1..25: note = n is a, c, g, or u
  variation 21..25: note = n may be present or absent
  modified_base 30: mod_base = OTHER; note = 2'-O-methyl nucleotide
  modified_base 31: mod_base = OTHER; note = 2'-O-methyl nucleotide
  modified_base 32: mod_base = OTHER; note = 2'-O-methyl nucleotide
  modified_base 33: mod_base = OTHER; note = 2'-O-methyl nucleotide
  modified_base 37: mod_base = OTHER; note = 2'-O-methyl nucleotide
  misc_feature 37..38: note = site of linker L1
  modified_base 38: mod_base = OTHER; note = 2'-O-methyl nucleotide
  modified_base 42: mod_base = OTHER; note = 2'-O-methyl nucleotide
  modified_base 43: mod_base = OTHER; note = 2'-O-methyl nucleotide
  modified_base 46: mod_base = OTHER; note = 2'-O-methyl nucleotide
  modified_base 49: mod_base = OTHER; note = phosphorothioate linkage
  modified_base 53: mod_base = OTHER; note = 2'-O-methyl nucleotide
  modified_base 54: mod_base = OTHER; note = 2'-O-methyl nucleotide
  modified_base 56: mod_base = OTHER; note = 2'-O-methyl nucleotide
  modified_base 57: mod_base = OTHER; note = 2'-O-methyl nucleotide
  modified_base 58: mod_base = OTHER; note = 2'-O-methyl nucleotide
  misc_feature 58..59: note = site of linker L1
  modified_base 59: mod_base = OTHER; note = 2'-O-methyl nucleotide
  modified_base 60: mod_base = OTHER; note = 2'-O-methyl nucleotide
  modified_base 61: mod_base = OTHER; note = 2'-O-methyl nucleotide
  modified_base 66: mod_base = OTHER; note = 2'-O-methyl nucleotide
  modified_base 68: mod_base = OTHER; note = 2'-O-methyl nucleotide
  modified_base 71: mod_base = OTHER; note = 2'-O-methyl nucleotide
  modified_base 77: mod_base = OTHER; note = 2'-O-methyl nucleotide
  modified_base 78: mod_base = OTHER; note = 2'-O-methyl nucleotide
  misc_feature 79..80: note = site of linker L1
  modified_base 87: mod_base = OTHER; note = 2'-O-methyl nucleotide, phosphorothioate linkage
  modified_base 88: mod_base = OTHER; note = 2'-O-methyl nucleotide
  source 1..88: mol_type = other RNA
nnnnnnnnnnnnnnnnnnnnnnnnngttgtagctccgcgttgctacaataaggccgtcgatgtgccgcaacgctctgccggcatcgtt

SEQ ID NO: 780 - RNA, 86 nt, synthetic construct
  misc_feature 1..86: note = Synthetic
  variation 1..25: note = n is a, c, g, or u
  variation 21..25: note = n may be present or absent
  modified_base 30: mod_base = OTHER; note = 2'-O-methyl nucleotide
  modified_base 31: mod_base = OTHER; note = 2'-O-methyl nucleotide
  modified_base 32: mod_base = OTHER; note = 2'-O-methyl nucleotide
  modified_base 33: mod_base = OTHER; note = 2'-O-methyl nucleotide
  misc_feature 36..37: note = site of linker L1
  modified_base 40: mod_base = OTHER; note = 2'-O-methyl nucleotide
  modified_base 41: mod_base = OTHER; note = 2'-O-methyl nucleotide
  modified_base 44: mod_base = OTHER; note = 2'-O-methyl nucleotide
  modified_base 47: mod_base = OTHER; note = phosphorothioate linkage
  modified_base 51: mod_base = OTHER; note = 2'-O-methyl nucleotide
  modified_base 52: mod_base = OTHER; note = 2'-O-methyl nucleotide
  modified_base 54: mod_base = OTHER; note = 2'-O-methyl nucleotide
  modified_base 55: mod_base = OTHER; note = 2'-O-methyl nucleotide
  modified_base 56: mod_base = OTHER; note = 2'-O-methyl nucleotide
  misc_feature 56..57: note = site of linker L1
  modified_base 57: mod_base = OTHER; note = 2'-O-methyl nucleotide
  modified_base 58: mod_base = OTHER; note = 2'-O-methyl nucleotide
  modified_base 59: mod_base = OTHER; note = 2'-O-methyl nucleotide
  modified_base 64: mod_base = OTHER; note = 2'-O-methyl nucleotide
  modified_base 66: mod_base = OTHER; note = 2'-O-methyl nucleotide
  modified_base 69: mod_base = OTHER; note = 2'-O-methyl nucleotide
  modified_base 75: mod_base = OTHER; note = 2'-O-methyl nucleotide
  modified_base 76: mod_base = OTHER; note = 2'-O-methyl nucleotide
  misc_feature 77..78: note = site of linker L1
  modified_base 85: mod_base = OTHER; note = 2'-O-methyl nucleotide, phosphorothioate linkage
  modified_base 86: mod_base = OTHER; note = 2'-O-methyl nucleotide
  source 1..86: mol_type = other RNA
nnnnnnnnnnnnnnnnnnnnnnnnngttgtagctccgttgctacaataaggccgtcgatgtgccgcaacgctctgccggcatcgtt

SEQ ID NO: 781 - RNA, 96 nt, synthetic construct
  misc_feature 1..96: note = Synthetic
  variation 1..25: note = n is a, c, g, or u
  variation 21..25: note = n may be present or absent
  modified_base 30: mod_base = OTHER; note = 2'-O-methyl nucleotide
  modified_base 31: mod_base = OTHER; note = 2'-O-methyl nucleotide
  modified_base 32: mod_base = OTHER; note = 2'-O-methyl nucleotide
  modified_base 33: mod_base = OTHER; note = 2'-O-methyl nucleotide
  modified_base 38: mod_base = OTHER; note = 2'-O-methyl nucleotide
  modified_base 39: mod_base = OTHER; note = 2'-O-methyl nucleotide
  modified_base 40: mod_base = OTHER; note = 2'-O-methyl nucleotide
  misc_feature 40..41: note = site of linker L1
  modified_base 41: mod_base = OTHER; note = 2'-O-methyl nucleotide
  modified_base 42: mod_base = OTHER; note = 2'-O-methyl nucleotide
  modified_base 43: mod_base = OTHER; note = 2'-O-methyl nucleotide
  modified_base 44: mod_base = OTHER; note = 2'-O-methyl nucleotide
  modified_base 48: mod_base = OTHER; note = 2'-O-methyl nucleotide
  modified_base 49: mod_base = OTHER; note = 2'-O-methyl nucleotide
  modified_base 52: mod_base = OTHER; note = 2'-O-methyl nucleotide
  modified_base 55: mod_base = OTHER; note = phosphorothioate linkage
  modified_base 59: mod_base = OTHER; note = 2'-O-methyl nucleotide
  modified_base 60: mod_base = OTHER; note = 2'-O-methyl nucleotide
  modified_base 62: mod_base = OTHER; note = 2'-O-methyl nucleotide
  modified_base 63: mod_base = OTHER; note = 2'-O-methyl nucleotide
  modified_base 64: mod_base = OTHER; note = 2'-O-methyl nucleotide
  modified_base 65: mod_base = OTHER; note = 2'-O-methyl nucleotide
  misc_feature 65..66: note = site of linker L1
  modified_base 66: mod_base = OTHER; note = 2'-O-methyl nucleotide
  modified_base 67: mod_base = OTHER; note = 2'-O-methyl nucleotide
  modified_base 68: mod_base = OTHER; note = 2'-O-methyl nucleotide
  modified_base 69: mod_base = OTHER; note = 2'-O-methyl nucleotide
  modified_base 74: mod_base = OTHER; note = 2'-O-methyl nucleotide
  modified_base 76: mod_base = OTHER; note = 2'-O-methyl nucleotide
  modified_base 79: mod_base = OTHER; note = 2'-O-methyl nucleotide
  modified_base 85: mod_base = OTHER; note = 2'-O-methyl nucleotide
  modified_base 86: mod_base = OTHER; note = 2'-O-methyl nucleotide
  misc_feature 87..88: note = site of linker L1
  modified_base 95: mod_base = OTHER; note = 2'-O-methyl nucleotide, phosphorothioate linkage
  modified_base 96: mod_base = OTHER; note = 2'-O-methyl nucleotide
  source 1..96: mol_type = other RNA
nnnnnnnnnnnnnnnnnnnnnnnnngttgtagctcccttgcaccgttgctacaataaggccgtctagatgtgccgcaacgctctgccggcatcgtt

SEQ ID NO: 782 - RNA, 96 nt, synthetic construct
  misc_feature 1..96: note = Synthetic
  variation 1..25: note = n is a, c, g, or u
  variation 21..25: note = n may be present or absent
  modified_base 30: mod_base = OTHER; note = 2'-O-methyl nucleotide
  modified_base 31: mod_base = OTHER; note = 2'-O-methyl nucleotide
  modified_base 32: mod_base = OTHER; note = 2'-O-methyl nucleotide
  modified_base 33: mod_base = OTHER; note = 2'-O-methyl nucleotide
  modified_base 38: mod_base = OTHER; note = 2'-O-methyl nucleotide
  modified_base 39: mod_base = OTHER; note = 2'-O-methyl nucleotide
  modified_base 40: mod_base = OTHER; note = 2'-O-methyl nucleotide
  misc_feature 40..41: note = site of linker L1
  modified_base 41: mod_base = OTHER; note = 2'-O-methyl nucleotide
  modified_base 42: mod_base = OTHER; note = 2'-O-methyl nucleotide
  modified_base 43: mod_base = OTHER; note = 2'-O-methyl nucleotide
  modified_base 44: mod_base = OTHER; note = 2'-O-methyl nucleotide
  modified_base 48: mod_base = OTHER; note = 2'-O-methyl nucleotide
  modified_base 49: mod_base = OTHER; note = 2'-O-methyl nucleotide
  modified_base 52: mod_base = OTHER; note = 2'-O-methyl nucleotide
  modified_base 55: mod_base = OTHER; note = phosphorothioate linkage
  modified_base 59: mod_base = OTHER; note = 2'-O-methyl nucleotide
  modified_base 60: mod_base = OTHER; note = 2'-O-methyl nucleotide
  modified_base 62: mod_base = OTHER; note = 2'-O-methyl nucleotide
  modified_base 63: mod_base = OTHER; note = 2'-O-methyl nucleotide
  modified_base 64: mod_base = OTHER; note = 2'-O-methyl nucleotide
  misc_feature 64..65: note = site of linker L1
  modified_base 65: mod_base = OTHER; note = 2'-O-methyl nucleotide
  modified_base 66: mod_base = OTHER; note = 2'-O-methyl nucleotide
  modified_base 67: mod_base = OTHER; note = 2'-O-methyl nucleotide
  modified_base 72: mod_base = OTHER; note = 2'-O-methyl nucleotide
  modified_base 74: mod_base = OTHER; note = 2'-O-methyl nucleotide
  modified_base 77: mod_base = OTHER; note = 2'-O-methyl nucleotide
  modified_base 83: mod_base = OTHER; note = 2'-O-methyl nucleotide
  modified_base 84: mod_base = OTHER; note = 2'-O-methyl nucleotide
  modified_base 86: mod_base = OTHER; note = 2'-O-methyl nucleotide
  misc_feature 86..87: note = site of linker L1
  modified_base 87: mod_base = OTHER; note = 2'-O-methyl nucleotide
  modified_base 95: mod_base = OTHER; note = 2'-O-methyl nucleotide, phosphorothioate linkage
  modified_base 96: mod_base = OTHER; note = 2'-O-methyl nucleotide
  source 1..96: mol_type = other RNA
nnnnnnnnnnnnnnnnnnnnnnnnngttgtagctcccttgcaccgttgctacaataaggccgtcgatgtgccgcaacgctctgcctaggcatcgtt

SEQ ID NO: 783-800 - skipped (18 entries)

SEQ ID NO: 801 - DNA, 4005 bp, synthetic construct
  misc_feature 1..4005: note = Synthetic
  source 1..4005: mol_type = other DNA
atggacggctccggcggcggctcccccaagaagaagcggaaggtggaggacaagcggcccgccgccaccaagaaggccggccaggccaagaagaagaagggcggctccggcggcggcgaggcctcccccgcctccggcccccggcacctgatggacccccacatcttcacctccaacttcaacaacggcatcggccggcacaagacctacctgtgctacgaggtggagcggctggacaacggcacctccgtgaagatggaccagcaccggggcttcctgcacaaccaggccaagaacctgctgtgcggcttctacggccggcacgccgagctgcggttcctggacctggtgccctccctgcagctggaccccgcccagatctaccgggtgacctggttcatctcctggtccccctgcttctcctggggctgcgccggcgaggtgcgggccttcctgcaggagaacacccacgtgcggctgcggatcttcgccgcccggatctacgactacgaccccctgtacaaggaggccctgcagatgctgcgggacgccggcgcccaggtgtccatcatgacctacgacgagttcaagcactgctgggacaccttcgtggaccaccagggctgccccttccagccctgggacggcctggacgagcactcccaggccctgtccggccggctgcgggccatcctgcagaaccagggcaactccggctccgagacccccggcacctccgagtccgccacccccgagtccgcagcgttcaaaccaaatcccatcaactacatcctgggcctggccatcggcatcgcctccgtgggctgggccatggtggagatcgacgaggaggagaaccccatccggctgatcgacctgggcgtgcgggtgttcgagcgggccgaggtgcccaagaccggcgactccctggccatggcccggcggctggcccggtccgtgcggcggctgacccggcggcgggcccaccggctgctgcgggcccggcggctgctgaagcgggagggcgtgctgcaggccgccgacttcgacgagaacggcctgatcaagtccctgcccaacaccccctggcagctgcgggccgccgccctggaccggaagctgacccccctggagtggtccgccgtgctgctgcacctgatcaagcaccggggctacctgtcccagcggaagaacgagggcgagaccgccgacaaggagctgggcgccctgctgaagggcgtggccaacaacgcccacgccctgcagaccggcgacttccggacccccgccgagctggccctgaacaagttcgagaaggagtccggccacatccggaaccagcggggcgactactcccacaccttctcccggaaggacctgcaggccgagctgatcctgctgttcgagaagcagaaggagttcggcaacccccacgtgtccggcggcctgaaggagggcatcgagaccctgctgatgacccagcggcccgccctgtccggcgacgccgtgcagaagatgctgggccactgcaccttcgagcccgccgagcccaaggccgccaagaacacctacaccgccgagcggttcatctggctgaccaagctgaacaacctgcggatcctggagcagggctccgagcggcccctgaccgacaccgagcgggccaccctgatggacgagccctaccggaagtccaagctgacctacgcccaggcccggaagctgctgggcctggaggacaccgccttcttcaagggcctgcggtacggcaaggacaacgccgaggcctccaccctgatggagatgaaggcctaccacgccatctcccgggccctggagaaggagggcctgaaggacaagaagtcccccctgaacctgtcctccgagctgcaggacgagatcggcaccgccttctccctgttcaagaccgacgaggacatcaccggccggctgaaggaccgggtgcagcccgagatcctggaggccctgctgaagcacatctccttcgacaagttcgtgcagatctccctgaaggccctgcggcggatcgtgcccctgatggagcagggcaagcggtacgacgaggcctgcgccgagatctacggcgaccactacggcaagaagaacaccgaggagaagatctacctgccccccatccccgccgacgagatccggaaccccgtggtgctgcgggccctgtcccaggcccggaaggtgatcaacggcgtggtgcggcggtacggctcccccgcccggatccacatcgagaccgcccgggaggtgggcaagtccttcaaggaccggaaggagatcgagaagcggcaggaggagaaccggaaggaccgggagaaggccgccgccaagttccgggagtacttccccaacttcgtgggcgagcccaagtccaaggacatcctgaagctgcggctgtacgagcagcagcacggcaagtgcctgtactccggcaaggagatcaacctggtgcggctgaacgagaagggctacgtggagatcgaccacgccctgcccttctcccggacctgggacgactccttcaacaacaaggtgctggtgctgggctccgagaaccagaacaagggcaaccagaccccctacgagtacttcaacggcaaggacaactcccgggagtggcaggagttcaaggcccgggtggagacctcccggttcccccggtccaagaagcagcggatcctgctgcagaagttcgacgaggacggcttcaaggagtgcaacctgaacgacacccggtacgtgaaccgcttcctgtgccagttcgtggccgaccacatcctgctgaccggcaagggcaagcggcgggtgttcgcctccaacggccagatcaccaacctgctgcggggcttctggggcctgcggaaggtgcgggccgagaacgaccggcaccacgccctggacgccgtggtggtggcctgctccaccgtggccatgcagcagaagatcacccggttcgtgcggtacaaggagatgaacgccttcgacggcaagaccatcgacaaggagaccggcaaggtgctgcaccagaagacccacttcccccagccctgggagttcttcgcccaggaggtgatgatccgggtgttcggcaagcccgacggcaagcccgagttcgaggaggccgacacccccgagaagctgcggaccctgctggccgagaagctgtcctcccggcccgaggccgtgcacgagtacgtgacccccctgttcgtgtcccgggcccccaaccggaagatgtccggcgcccacaaggacaccctgcggtccgccaagcggttcgtgaagcacaacgagaagatctccgtgaagcgggtgtggctgaccgagatcaagctggccgacctggagaacatggtgaactacaagaacggccgggagatcgagctgtacgaggccctgaaggcccggctggaggcctacggcggcaacgccaagcaggccttcgaccccaaggacaaccccttctacaagaagggcggccagctggtgaaggccgtgcgggtggagaagacccaggagtccggcgtgctgctgaacaagaagaacgcctacaccatcgccgacaacggcgacatggtgcgggtggacgtgttctgcaaggtggacaagaagggcaagaaccagtacttcatcgtgcccatctacgcctggcaggtggccgagaacatcctgcccgacatcgactgcaagggctaccggatcgacgactcctacaccttctgcttctccctgcacaagtacgacctgatcgccttccagaaggacgagaagtccaaggtggagttcgcctactacatcaactgcgactcctccaacggccggttctacctggcctggcacgacaagggctccaaggagcagcagttccggatctccacccagaacctggtgctgatccagaagtaccaggtgaacgagctgggcaaggagatccggccctgccggctgaagaagcggccccccgtgcggtag

SEQ ID NO: 802 - DNA, 3363 bp, synthetic construct
  misc_feature 1..3363: note = Synthetic
  source 1..3363: mol_type = other DNA
atggacggctccggcggcggctcccccaagaagaagcggaaggtggaggacaagcggcccgccgccaccaagaaggccggccaggccaagaagaagaagggcggctccggcggcggcgccgccttcaagcccaaccccatcaactacatcctgggcctggacatcggcatcgcctccgtgggctgggccatggtggagatcgacgaggaggagaaccccatccggctgatcgacctgggcgtgcgggtgttcgagcgggccgaggtgcccaagaccggcgactccctggccatggcccggcggctggcccggtccgtgcggcggctgacccggcggcgggcccaccggctgctgcgggcccggcggctgctgaagcgggagggcgtgctgcaggccgccgacttcgacgagaacggcctgatcaagtccctgcccaacaccccctggcagctgcgggccgccgccctggaccggaagctgacccccctggagtggtccgccgtgctgctgcacctgatcaagcaccggggctacctgtcccagcggaagaacgagggcgagaccgccgacaaggagctgggcgccctgctgaagggcgtggccaacaacgcccacgccctgcagaccggcgacttccggacccccgccgagctggccctgaacaagttcgagaaggagtccggccacatccggaaccagcggggcgactactcccacaccttctcccggaaggacctgcaggccgagctgatcctgctgttcgagaagcagaaggagttcggcaacccccacgtgtccggcggcctgaaggagggcatcgagaccctgctgatgacccagcggcccgccctgtccggcgacgccgtgcagaagatgctgggccactgcaccttcgagcccgccgagcccaaggccgccaagaacacctacaccgccgagcggttcatctggctgaccaagctgaacaacctgcggatcctggagcagggctccgagcggcccctgaccgacaccgagcgggccaccctgatggacgagccctaccggaagtccaagctgacctacgcccaggcccggaagctgctgggcctggaggacaccgccttcttcaagggcctgcggtacggcaaggacaacgccgaggcctccaccctgatggagatgaaggcctaccacgccatctcccgggccctggagaaggagggcctgaaggacaagaagtcccccctgaacctgtcctccgagctgcaggacgagatcggcaccgccttctccctgttcaagaccgacgaggacatcaccggccggctgaaggaccgggtgcagcccgagatcctggaggccctgctgaagcacatctccttcgacaagttcgtgcagatctccctgaaggccctgcggcggatcgtgcccctgatggagcagggcaagcggtacgacgaggcctgcgccgagatctacggcgaccactacggcaagaagaacaccgaggagaagatctacctgccccccatccccgccgacgagatccggaaccccgtggtgctgcgggccctgtcccaggcccggaaggtgatcaacggcgtggtgcggcggtacggctcccccgcccggatccacatcgagaccgcccgggaggtgggcaagtccttcaaggaccggaaggagatcgagaagcggcaggaggagaaccggaaggaccgggagaaggccgccgccaagttccgggagtacttccccaacttcgtgggcgagcccaagtccaaggacatcctgaagctgcggctgtacgagcagcagcacggcaagtgcctgtactccggcaaggagatcaacctggtgcggctgaacgagaagggctacgtggagatcgaccacgccctgcccttctcccggacctgggacgactccttcaacaacaaggtgctggtgctgggctccgagaaccagaacaagggcaaccagaccccctacgagtacttcaacggcaaggacaactcccgggagtggcaggagttcaaggcccgggtggagacctcccggttcccccggtccaagaagcagcggatcctgctgcagaagttcgacgaggacggcttcaaggagtgcaacctgaacgacacccggtacgtgaaccggttcctgtgccagttcgtggccgaccacatcctgctgaccggcaagggcaagcggcgggtgttcgcctccaacggccagatcaccaacctgctgcggggcttctggggcctgcggaaggtgcgggccgagaacgaccggcaccacgccctggacgccgtggtggtggcctgctccaccgtggccatgcagcagaagatcacccggttcgtgcggtacaaggagatgaacgccttcgacggcaagaccatcgacaaggagaccggcaaggtgctgcaccagaagacccacttcccccagccctgggagttcttcgcccaggaggtgatgatccgggtgttcggcaagcccgacggcaagcccgagttcgaggaggccgacacccccgagaagctgcggaccctgctggccgagaagctgtcctcccggcccgaggccgtgcacgagtacgtgacccccctgttcgtgtcccgggcccccaaccggaagatgtccggcgcccacaaggacaccctgcggtccgccaagcggttcgtgaagcacaacgagaagatctccgtgaagcgggtgtggctgaccgagatcaagctggccgacctggagaacatggtgaactacaagaacggccgggagatcgagctgtacgaggccctgaaggcccggctggaggcctacggcggcaacgccaagcaggccttcgaccccaaggacaaccccttctacaagaagggcggccagctggtgaaggccgtgcgggtggagaagacccaggagtccggcgtgctgctgaacaagaagaacgcctacaccatcgccgacaacggcgacatggtgcgggtggacgtgttctgcaaggtggacaagaagggcaagaaccagtacttcatcgtgcccatctacgcctggcaggtggccgagaacatcctgcccgacatcgactgcaagggctaccggatcgacgactcctacaccttctgcttctccctgcacaagtacgacctgatcgccttccagaaggacgagaagtccaaggtggagttcgcctactacatcaactgcgactcctccaacggccggttctacctggcctggcacgacaagggctccaaggagcagcagttccggatctccacccagaacctggtgctgatccagaagtaccaggtgaacgagctgggcaaggagatccggccctgccggctgaagaagcggccccccgtgcggtag

SEQ ID NO: 803 - DNA, 3420 bp, synthetic construct
  misc_feature 1..3420: note = Synthetic
  source 1..3420: mol_type = other DNA
atggacggctccggcggcggctcccccaagaagaagcggaaggtggaggacaagcggcccgccgccaccaagaaggccggccaggccaagaagaagaagggcggctccggcggcggcgccgccttcaagcccaaccccatcaactacatcctgggcctggacatcggcatcgcctccgtgggctgggccatggtggagatcgacgaggaggagaaccccatccggctgatcgacctgggcgtgcgggtgttcgagcgggccgaggtgcccaagaccggcgactccctggccatggcccggcggctggcccggtccgtgcggcggctgacccggcggcgggcccaccggctgctgcgggcccggcggctgctgaagcgggagggcgtgctgcaggccgccgacttcgacgagaacggcctgatcaagtccctgcccaacaccccctggcagctgcgggccgccgccctggaccggaagctgacccccctggagtggtccgccgtgctgctgcacctgatcaagcaccggggctacctgtcccagcggaagaacgagggcgagaccgccgacaaggagctgggcgccctgctgaagggcgtggccaacaacgcccacgccctgcagaccggcgacttccggacccccgccgagctggccctgaacaagttcgagaaggagtccggccacatccggaaccagcggggcgactactcccacaccttctcccggaaggacctgcaggccgagctgatcctgctgttcgagaagcagaaggagttcggcaacccccacgtgtccggcggcctgaaggagggcatcgagaccctgctgatgacccagcggcccgccctgtccggcgacgccgtgcagaagatgctgggccactgcaccttcgagcccgccgagcccaaggccgccaagaacacctacaccgccgagcggttcatctggctgaccaagctgaacaacctgcggatcctggagcagggctccgagcggcccctgaccgacaccgagcgggccaccctgatggacgagccctaccggaagtccaagctgacctacgcccaggcccggaagctgctgggcctggaggacaccgccttcttcaagggcctgcggtacggcaaggacaacgccgaggcctccaccctgatggagatgaaggcctaccacgccatctcccgggccctggagaaggagggcctgaaggacaagaagtcccccctgaacctgtcctccgagctgcaggacgagatcggcaccgccttctccctgttcaagaccgacgaggacatcaccggccggctgaaggaccgggtgcagcccgagatcctggaggccctgctgaagcacatctccttcgacaagttcgtgcagatctccctgaaggccctgcggcggatcgtgcccctgatggagcagggcaagcggtacgacgaggcctgcgccgagatctacggcgaccactacggcaagaagaacaccgaggagaagatctacctgccccccatccccgccgacgagatccggaaccccgtggtgctgcgggccctgtcccaggcccggaaggtgatcaacggcgtggtgcggcggtacggctcccccgcccggatccacatcgagaccgcccgggaggtgggcaagtccttcaaggaccggaaggagatcgagaagcggcaggaggagaaccggaaggaccgggagaaggccgccgccaagttccgggagtacttccccaacttcgtgggcgagcccaagtccaaggacatcctgaagctgcggctgtacgagcagcagcacggcaagtgcctgtactccggcaaggagatcaacctggtgcggctgaacgagaagggctacgtggagatcgaccacgccctgcccttctcccggacctgggacgactccttcaacaacaaggtgctggtgctgggctccgagaaccagaacaagggcaaccagaccccctacgagtacttcaacggcaaggacaactcccgggagtggcaggagttcaaggcccgggtggagacctcccggttcccccggtccaagaagcagcggatcctgctgcagaagttcgacgaggacggcttcaaggagtgcaacctgaacgacacccggtacgtgaaccggttcctgtgccagttcgtggccgaccacatcctgctgaccggcaagggcaagcggcgggtgttcgcctccaacggccagatcaccaacctgctgcggggcttctggggcctgcggaaggtgcgggccgagaacgaccggcaccacgccctggacgccgtggtggtggcctgctccaccgtggccatgcagcagaagatcacccggttcgtgcggtacaaggagatgaacgccttcgacggcaagaccatcgacaaggagaccggcaaggtgctgcaccagaagacccacttcccccagccctgggagttcttcgcccaggaggtgatgatccgggtgttcggcaagcccgacggcaagcccgagttcgaggaggccgacacccccgagaagctgcggaccctgctggccgagaagctgtcctcccggcccgaggccgtgcacgagtacgtgacccccctgttcgtgtcccgggcccccaaccggaagatgtccggcgcccacaaggacaccctgcggtccgccaagcggttcgtgaagcacaacgagaagatctccgtgaagcgggtgtggctgaccgagatcaagctggccgacctggagaacatggtgaactacaagaacggccgggagatcgagctgtacgaggccctgaaggcccggctggaggcctacggcggcaacgccaagcaggccttcgaccccaaggacaaccccttctacaagaagggcggccagctggtgaaggccgtgcgggtggagaagacccaggagtccggcgtgctgctgaacaagaagaacgcctacaccatcgccgacaacggcgacatggtgcgggtggacgtgttctgcaaggtggacaagaagggcaagaaccagtacttcatcgtgcccatctacgcctggcaggtggccgagaacatcctgcccgacatcgactgcaagggctaccggatcgacgactcctacaccttctgcttctccctgcacaagtacgacctgatcgccttccagaaggacgagaagtccaaggtggagttcgcctactacatcaactgcgactcctccaacggccggttctacctggcctggcacgacaagggctccaaggagcagcagttccggatctccacccagaacctggtgctgatccagaagtaccaggtgaacgagctgggcaaggagatccggccctgccggctgaagaagcggccccccgtgcggtccgagtccgccacccccgagtccgtgtccggctggcggctgttcaagaagatctcctag

SEQ ID NO: 804 - DNA, 4005 bp, synthetic construct
  misc_feature 1..4005: note = Synthetic
  source 1..4005: mol_type = other DNA
atggacggctccggcggcggctcccccaagaagaagcggaaggtggaggacaagcggcccgccgccaccaagaaggccggccaggccaagaagaagaagggcggctccggcggcggcgaggcctcccccgcctccggcccccggcacctgatggacccccacatcttcacctccaacttcaacaacggcatcggccggcacaagacctacctgtgctacgaggtggagcggctggacaacggcacctccgtgaagatggaccagcaccggggcttcctgcacaaccaggccaagaacctgctgtgcggcttctacggccggcacgccgagctgcggttcctggacctggtgccctccctgcagctggaccccgcccagatctaccgggtgacctggttcatctcctggtccccctgcttctcctggggctgcgccggcgaggtgcgggccttcctgcaggagaacacccacgtgcggctgcggatcttcgccgcccggatctacgactacgaccccctgtacaaggaggccctgcagatgctgcgggacgccggcgcccaggtgtccatcatgacctacgacgagttcaagcactgctgggacaccttcgtggaccaccagggctgccccttccagccctgggacggcctggacgagcactcccaggccctgtccggccggctgcgggccatcctgcagaaccagggcaacggcaccaaggactccaccaaggacatccccgagaccccctccaaggacgcagcgttcaaaccaaatcccatcaactacatcctgggcctggccatcggcatcgcctccgtgggctgggccatggtggagatcgacgaggaggagaaccccatccggctgatcgacctgggcgtgcgggtgttcgagcgggccgaggtgcccaagaccggcgactccctggccatggcccggcggctggcccggtccgtgcggcggctgacccggcggcgggcccaccggctgctgcgggcccggcggctgctgaagcgggagggcgtgctgcaggccgccgacttcgacgagaacggcctgatcaagtccctgcccaacaccccctggcagctgcgggccgccgccctggaccggaagctgacccccctggagtggtccgccgtgctgctgcacctgatcaagcaccggggctacctgtcccagcggaagaacgagggcgagaccgccgacaaggagctgggcgccctgctgaagggcgtggccaacaacgcccacgccctgcagaccggcgacttccggacccccgccgagctggccctgaacaagttcgagaaggagtccggccacatccggaaccagcggggcgactactcccacaccttctcccggaaggacctgcaggccgagctgatcctgctgttcgagaagcagaaggagttcggcaacccccacgtgtccggcggcctgaaggagggcatcgagaccctgctgatgacccagcggcccgccctgtccggcgacgccgtgcagaagatgctgggccactgcaccttcgagcccgccgagcccaaggccgccaagaacacctacaccgccgagcggttcatctggctgaccaagctgaacaacctgcggatcctggagcagggctccgagcggcccctgaccgacaccgagcgggccaccctgatggacgagccctaccggaagtccaagctgacctacgcccaggcccggaagctgctgggcctggaggacaccgccttcttcaagggcctgcggtacggcaaggacaacgccgaggcctccaccctgatggagatgaaggcctaccacgccatctcccgggccctggagaaggagggcctgaaggacaagaagtcccccctgaacctgtcctccgagctgcaggacgagatcggcaccgccttctccctgttcaagaccgacgaggacatcaccggccggctgaaggaccgggtgcagcccgagatcctggaggccctgctgaagcacatctccttcgacaagttcgtgcagatctccctgaaggccctgcggcggatcgtgcccctgatggagcagggcaagcggtacgacgaggcctgcgccgagatctacggcgaccactacggcaagaagaacaccgaggagaagatctacctgccccccatccccgccgacgagatccggaaccccgtggtgctgcgggccctgtcccaggcccggaaggtgatcaacggcgtggtgcggcggtacggctcccccgcccggatccacatcgagaccgcccgggaggtgggcaagtccttcaaggaccggaaggagatcgagaagcggcaggaggagaaccggaaggaccgggagaaggccgccgccaagttccgggagtacttccccaacttcgtgggcgagcccaagtccaaggacatcctgaagctgcggctgtacgagcagcagcacggcaagtgcctgtactccggcaaggagatcaacctggtgcggctgaacgagaagggctacgtggagatcgaccacgccctgcccttctcccggacctgggacgactccttcaacaacaaggtgctggtgctgggctccgagaaccagaacaagggcaaccagaccccctacgagtacttcaacggcaaggacaactcccgggagtggcaggagttcaaggcccgggtggagacctcccggttcccccggtccaagaagcagcggatcctgctgcagaagttcgacgaggacggcttcaaggagtgcaacctgaacgacacccggtacgtgaaccgcttcctgtgccagttcgtggccgaccacatcctgctgaccggcaagggcaagcggcgggtgttcgcctccaacggccagatcaccaacctgctgcggggcttctggggcctgcggaaggtgcgggccgagaacgaccggcaccacgccctggacgccgtggtggtggcctgctccaccgtggccatgcagcagaagatcacccggttcgtgcggtacaaggagatgaacgccttcgacggcaagaccatcgacaaggagaccggcaaggtgctgcaccagaagacccacttcccccagccctgggagttcttcgcccaggaggtgatgatccgggtgttcggcaagcccgacggcaagcccgagttcgaggaggccgacacccccgagaagctgcggaccctgctggccgagaagctgtcctcccggcccgaggccgtgcacgagtacgtgacccccctgttcgtgtcccgggcccccaaccggaagatgtccggcgcccacaaggacaccctgcggtccgccaagcggttcgtgaagcacaacgagaagatctccgtgaagcgggtgtggctgaccgagatcaagctggccgacctggagaacatggtgaactacaagaacggccgggagatcgagctgtacgaggccctgaaggcccggctggaggcctacggcggcaacgccaagcaggccttcgaccccaaggacaaccccttctacaagaagggcggccagctggtgaaggccgtgcgggtggagaagacccaggagtccggcgtgctgctgaacaagaagaacgcctacaccatcgccgacaacggcgacatggtgcgggtggacgtgttctgcaaggtggacaagaagggcaagaaccagtacttcatcgtgcccatctacgcctggcaggtggccgagaacatcctgcccgacatcgactgcaagggctaccggatcgacgactcctacaccttctgcttctccctgcacaagtacgacctgatcgccttccagaaggacgagaagtccaaggtggagttcgcctactacatcaactgcgactcctccaacggccggttctacctggcctggcacgacaagggctccaaggagcagcagttccggatctccacccagaacctggtgctgatccagaagtaccaggtgaacgagctgggcaaggagatccggccctgccggctgaagaagcggccccccgtgcggtag

SEQ ID NO: 805 - DNA, 3249 bp, synthetic construct
  misc_feature 1..3249: note = Synthetic
  source 1..3249: mol_type = other DNA
  modified_base 3247: mod_base = OTHER; note = uracil
atggctgcttttaagcctaatcctattaattatattcttggtcttgatattggtattgcttctgttggttgggctatggttgagattgatgaggaggagaatcctattcgtcttattgatcttggtgttcgtgtttttgagcgtgctgaggttcctaagactggtgattctcttgctatggctcgtcgtcttgctcgttctgttcgtcgtcttactcgtcgtcgtgctcatcgtcttcttcgtgctcgtcgtcttcttaagcgtgagggtgttcttcaggctgctgattttgatgagaatggtcttattaagtctcttcctaatactccttggcagcttcgtgctgctgctcttgatcgtaagcttactcctcttgagtggtctgctgttcttcttcatcttattaagcatcgtggttatctttctcagcgtaagaatgagggtgagactgctgataaggagcttggtgctcttcttaagggtgttgctaataatgctcatgctcttcagactggtgattttcgtactcctgctgagcttgctcttaataagtttgagaaggagtctggtcatattcgtaatcagcgtggtgattattctcatactttttctcgtaaggatcttcaggctgagcttattcttctttttgagaagcagaaggagtttggtaatcctcatgtttctggtggtcttaaggagggtattgagactcttcttatgactcagcgtcctgctctttctggtgatgctgttcagaagatgcttggtcattgtacttttgagcctgctgagcctaaggctgctaagaatacttatactgctgagcgttttatttggcttactaagcttaataatcttcgtattcttgagcagggttctgagcgtcctcttactgatactgagcgtgctactcttatggatgagccttatcgtaagtctaagcttacttatgctcaggctcgtaagcttcttggtcttgaggatactgctttttttaagggtcttcgttatggtaaggataatgctgaggcttctactcttatggagatgaaggcttatcatgctatttctcgtgctcttgagaaggagggtcttaaggataagaagtctcctcttaatctttcttctgagcttcaggatgagattggtactgctttttctctttttaagactgatgaggatattactggtcgtcttaaggatcgtgttcagcctgagattcttgaggctcttcttaagcatatttcttttgataagtttgttcagatttctcttaaggctcttcgtcgtattgttcctcttatggagcagggtaagcgttatgatgaggcttgtgctgagatttatggtgatcattatggtaagaagaatactgaggagaagatttatcttcctcctattcctgctgatgagattcgtaatcctgttgttcttcgtgctctttctcaggctcgtaaggttattaatggtgttgttcgtcgttatggttctcctgctcgtattcatattgagactgctcgtgaggttggtaagtcttttaaggatcgtaaggagattgagaagcgtcaggaggagaatcgtaaggatcgtgagaaggctgctgctaagtttcgtgagtattttcctaattttgttggtgagcctaagtctaaggatattcttaagcttcgtctttatgagcagcagcatggtaagtgtctttattctggtaaggagattaatcttgttcgtcttaatgagaagggttatgttgagattgatcatgctcttcctttttctcgtacttgggatgattcttttaataataaggttcttgttcttggttctgagaatcagaataagggtaatcagactccttatgagtattttaatggtaaggataattctcgtgagtggcaggagtttaaggctcgtgttgagacttctcgttttcctcgttctaagaagcagcgtattcttcttcagaagtttgatgaggatggttttaaggagtgtaatcttaatgatactcgttatgttaatcgttttctttgtcagtttgttgctgatcatattcttcttactggtaagggtaagcgtcgtgtttttgcttctaatggtcagattactaatcttcttcgtggtttttggggtcttcgtaaggttcgtgctgagaatgatcgtcatcatgctcttgatgctgttgttgttgcttgttctactgttgctatgcagcagaagattactcgttttgttcgttataaggagatgaatgcttttgatggtaagactattgataaggagactggtaaggttcttcatcagaagactcattttcctcagccttgggagttttttgctcaggaggttatgattcgtgtttttggtaagcctgatggtaagcctgagtttgaggaggctgatactcctgagaagcttcgtactcttcttgctgagaagctttcttctcgtcctgaggctgttcatgagtatgttactcctctttttgtttctcgtgctcctaatcgtaagatgtctggtgctcataaggatactcttcgttctgctaagcgttttgttaagcataatgagaagatttctgttaagcgtgtttggcttactgagattaagcttgctgatcttgagaatatggttaattataagaatggtcgtgagattgagctttatgaggctcttaaggctcgtcttgaggcttatggtggtaatgctaagcaggcttttgatcctaaggataatcctttttataagaagggtggtcagcttgttaaggctgttcgtgttgagaagactcaggagtctggtgttcttcttaataagaagaatgcttatactattgctgataatggtgatatggttcgtgttgatgttttttgtaaggttgataagaagggtaagaatcagtattttattgttcctatttatgcttggcaggttgctgagaatattcttcctgatattgattgtaagggttatcgtattgatgattcttatactttttgtttttctcttcataagtatgatcttattgcttttcagaaggatgagaagtctaaggttgagtttgcttattatattaattgtgattcttctaatggtcgtttttatcttgcttggcatgataagggttctaaggagcagcagtttcgtatttctactcagaatcttgttcttattcagaagtatcaggttaatgagcttggtaaggagattcgtccttgtcgtcttaagaagcgtcctcctgttcgttga

SEQ ID NO: 806 - DNA, 3249 bp, synthetic construct
  misc_feature 1..3249: note = Synthetic
  modified_base 3247: mod_base = OTHER; note = uracil
  source 1..3249: mol_type = other DNA
atggccgccttcaagcccaaccccatcaactacatcctgggcctggacatcggcatcgcctccgtgggctgggccatggtggagatcgacgaggaggagaaccccatccggctgatcgacctgggcgtgcgggtgttcgagcgggccgaggtgcccaagaccggcgactccctggccatggcccggcggctggcccggtccgtgcggcggctgacccggcggcgggcccaccggctgctgcgggcccggcggctgctgaagcgggagggcgtgctgcaggccgccgacttcgacgagaacggcctgatcaagtccctgcccaacaccccctggcagctgcgggccgccgccctggaccggaagctgacccccctggagtggtccgccgtgctgctgcacctgatcaagcaccggggctacctgtcccagcggaagaacgagggcgagaccgccgacaaggagctgggcgccctgctgaagggcgtggccaacaacgcccacgccctgcagaccggcgacttccggacccccgccgagctggccctgaacaagttcgagaaggagtccggccacatccggaaccagcggggcgactactcccacaccttctcccggaaggacctgcaggccgagctgatcctgctgttcgagaagcagaaggagttcggcaacccccacgtgtccggcggcctgaaggagggcatcgagaccctgctgatgacccagcggcccgccctgtccggcgacgccgtgcagaagatgctgggccactgcaccttcgagcccgccgagcccaaggccgccaagaacacctacaccgccgagcggttcatctggctgaccaagctgaacaacctgcggatcctggagcagggctccgagcggcccctgaccgacaccgagcgggccaccctgatggacgagccctaccggaagtccaagctgacctacgcccaggcccggaagctgctgggcctggaggacaccgccttcttcaagggcctgcggtacggcaaggacaacgccgaggcctccaccctgatggagatgaaggcctaccacgccatctcccgggccctggagaaggagggcctgaaggacaagaagtcccccctgaacctgtcctccgagctgcaggacgagatcggcaccgccttctccctgttcaagaccgacgaggacatcaccggccggctgaaggaccgggtgcagcccgagatcctggaggccctgctgaagcacatctccttcgacaagttcgtgcagatctccctgaaggccctgcggcggatcgtgcccctgatggagcagggcaagcggtacgacgaggcctgcgccgagatctacggcgaccactacggcaagaagaacaccgaggagaagatctacctgccccccatccccgccgacgagatccggaaccccgtggtgctgcgggccctgtcccaggcccggaaggtgatcaacggcgtggtgcggcggtacggctcccccgcccggatccacatcgagaccgcccgggaggtgggcaagtccttcaaggaccggaaggagatcgagaagcggcaggaggagaaccggaaggaccgggagaaggccgccgccaagttccgggagtacttccccaacttcgtgggcgagcccaagtccaaggacatcctgaagctgcggctgtacgagcagcagcacggcaagtgcctgtactccggcaaggagatcaacctggtgcggctgaacgagaagggctacgtggagatcgaccacgccctgcccttctcccggacctgggacgactccttcaacaacaaggtgctggtgctgggctccgagaaccagaacaagggcaaccagaccccctacgagtacttcaacggcaaggacaactcccgggagtggcaggagttcaaggcccgggtggagacctcccggttcccccggtccaagaagcagcggatcctgctgcagaagttcgacgaggacggcttcaaggagtgcaacctgaacgacacccggtacgtgaaccggttcctgtgccagttcgtggccgaccacatcctgctgaccggcaagggcaagcggcgggtgttcgcctccaacggccagatcaccaacctgctgcggggcttctggggcctgcggaaggtgcgggccgagaacgaccggcaccacgccctggacgccgtggtggtggcctgctccaccgtggccatgcagcagaagatcacccggttcgtgcggtacaaggagatgaacgccttcgacggcaagaccatcgacaaggagaccggcaaggtgctgcaccagaagacccacttcccccagccctgggagttcttcgcccaggaggtgatgatccgggtgttcggcaagcccgacggcaagcccgagttcgaggaggccgacacccccgagaagctgcggaccctgctggccgagaagctgtcctcccggcccgaggccgtgcacgagtacgtgacccccctgttcgtgtcccgggcccccaaccggaagatgtccggcgcccacaaggacaccctgcggtccgccaagcggttcgtgaagcacaacgagaagatctccgtgaagcgggtgtggctgaccgagatcaagctggccgacctggagaacatggtgaactacaagaacggccgggagatcgagctgtacgaggccctgaaggcccggctggaggcctacggcggcaacgccaagcaggccttcgaccccaaggacaaccccttctacaagaagggcggccagctggtgaaggccgtgcgggtggagaagacccaggagtccggcgtgctgctgaacaagaagaacgcctacaccatcgccgacaacggcgacatggtgcgggtggacgtgttctgcaaggtggacaagaagggcaagaaccagtacttcatcgtgcccatctacgcctggcaggtggccgagaacatcctgcccgacatcgactgcaagggctaccggatcgacgactcctacaccttctgcttctccctgcacaagtacgacctgatcgccttccagaaggacgagaagtccaaggtggagttcgcctactacatcaactgcgactcctccaacggccggttctacctggcctggcacgacaagggctccaaggagcagcagttccggatctccacccagaacctggtgctgatccagaagtaccaggtgaacgagctgggcaaggagatccggccctgccggctgaagaagcggccccccgtgcggtga

SEQ ID NO: 807 - DNA, 3249 bp, synthetic construct
  misc_feature 1..3249: note = Synthetic
  modified_base 3247: mod_base = OTHER; note = uracil
  source 1..3249: mol_type = other DNA
atggcagcattcaaaccaaacccaatcaactacatcctaggactagacatcggaatcgcatcagtaggatgagcaatggtagaaatcgacgaagaagaaaacccaatccgactaatcgacctaggagtacgagtattcgaacgagcagaagtaccaaaaacaggagactcactagcaatggcacgacgactagcacgatcagtacgacgactaacacgacgacgagcacaccgactactacgagcacgacgactactaaaacgagaaggagtactacaagcagcagacttcgacgaaaacggactaatcaaatcactaccaaacacaccatgacaactacgagcagcagcactagaccgaaaactaacaccactagaatgatcagcagtactactacacctaatcaaacaccgaggatacctatcacaacgaaaaaacgaaggagaaacagcagacaaagaactaggagcactactaaaaggagtagcaaacaacgcacacgcactacaaacaggagacttccgaacaccagcagaactagcactaaacaaattcgaaaaagaatcaggacacatccgaaaccaacgaggagactactcacacacattctcacgaaaagacctacaagcagaactaatcctactattcgaaaaacaaaaagaattcggaaacccacacgtatcaggaggactaaaagaaggaatcgaaacactactaatgacacaacgaccagcactatcaggagacgcagtacaaaaaatgctaggacactgcacattcgaaccagcagaaccaaaagcagcaaaaaacacatacacagcagaacgattcatctgactaacaaaactaaacaacctacgaatcctagaacaaggatcagaacgaccactaacagacacagaacgagcaacactaatggacgaaccataccgaaaatcaaaactaacatacgcacaagcacgaaaactactaggactagaagacacagcattcttcaaaggactacgatacggaaaagacaacgcagaagcatcaacactaatggaaatgaaagcataccacgcaatctcacgagcactagaaaaagaaggactaaaagacaaaaaatcaccactaaacctatcatcagaactacaagacgaaatcggaacagcattctcactattcaaaacagacgaagacatcacaggacgactaaaagaccgagtacaaccagaaatcctagaagcactactaaaacacatctcattcgacaaattcgtacaaatctcactaaaagcactacgacgaatcgtaccactaatggaacaaggaaaacgatacgacgaagcatgcgcagaaatctacggagaccactacggaaaaaaaaacacagaagaaaaaatctacctaccaccaatcccagcagacgaaatccgaaacccagtagtactacgagcactatcacaagcacgaaaagtaatcaacggagtagtacgacgatacggatcaccagcacgaatccacatcgaaacagcacgagaagtaggaaaatcattcaaagaccgaaaagaaatcgaaaaacgacaagaagaaaaccgaaaagaccgagaaaaagcagcagcaaaattccgagaatacttcccaaacttcgtaggagaaccaaaatcaaaagacatcctaaaactacgactatacgaacaacaacacggaaaatgcctatactcaggaaaagaaatcaacctagtacgactaaacgaaaaaggatacgtagaaatcgaccacgcactaccattctcacgaacatgagacgactcattcaacaacaaagtactagtactaggatcagaaaaccaaaacaaaggaaaccaaacaccatacgaatacttcaacggaaaagacaactcacgagaatgacaagaattcaaagcacgagtagaaacatcacgattcccacgatcaaaaaaacaacgaatcctactacaaaaattcgacgaagacggattcaaagaatgcaacctaaacgacacacgatacgtaaaccgattcctatgccaattcgtagcagaccacatcctactaacaggaaaaggaaaacgacgagtattcgcatcaaacggacaaatcacaaacctactacgaggattctgaggactacgaaaagtacgagcagaaaacgaccgacaccacgcactagacgcagtagtagtagcatgctcaacagtagcaatgcaacaaaaaatcacacgattcgtacgatacaaagaaatgaacgcattcgacggaaaaacaatcgacaaagaaacaggaaaagtactacaccaaaaaacacacttcccacaaccatgagaattcttcgcacaagaagtaatgatccgagtattcggaaaaccagacggaaaaccagaattcgaagaagcagacacaccagaaaaactacgaacactactagcagaaaaactatcatcacgaccagaagcagtacacgaatacgtaacaccactattcgtatcacgagcaccaaaccgaaaaatgtcaggagcacacaaagacacactacgatcagcaaaacgattcgtaaaacacaacgaaaaaatctcagtaaaacgagtatgactaacagaaatcaaactagcagacctagaaaacatggtaaactacaaaaacggacgagaaatcgaactatacgaagcactaaaagcacgactagaagcatacggaggaaacgcaaaacaagcattcgacccaaaagacaacccattctacaaaaaaggaggacaactagtaaaagcagtacgagtagaaaaaacacaagaatcaggagtactactaaacaaaaaaaacgcatacacaatcgcagacaacggagacatggtacgagtagacgtattctgcaaagtagacaaaaaaggaaaaaaccaatacttcatcgtaccaatctacgcatgacaagtagcagaaaacatcctaccagacatcgactgcaaaggataccgaatcgacgactcatacacattctgcttctcactacacaaatacgacctaatcgcattccaaaaagacgaaaaatcaaaagtagaattcgcatactacatcaactgcgactcatcaaacggacgattctacctagcatgacacgacaaaggatcaaaagaacaacaattccgaatctcaacacaaaacctagtactaatccaaaaataccaagtaaacgaactaggaaaagaaatccgaccatgccgactaaaaaaacgaccaccagtacgataa

SEQ ID NO: 808 - DNA, 3249 bp, synthetic construct
  misc_feature 1..3249: note = Synthetic
  modified_base 3247: mod_base = OTHER; note = uracil
  source 1..3249: mol_type = other DNA
atggctgcttttaagcctaatcctattaattatattcttggtcttgctattggtattgcttctgttggttgggctatggttgagattgatgaggaggagaatcctattcgtcttattgatcttggtgttcgtgtttttgagcgtgctgaggttcctaagactggtgattctcttgctatggctcgtcgtcttgctcgttctgttcgtcgtcttactcgtcgtcgtgctcatcgtcttcttcgtgctcgtcgtcttcttaagcgtgagggtgttcttcaggctgctgattttgatgagaatggtcttattaagtctcttcctaatactccttggcagcttcgtgctgctgctcttgatcgtaagcttactcctcttgagtggtctgctgttcttcttcatcttattaagcatcgtggttatctttctcagcgtaagaatgagggtgagactgctgataaggagcttggtgctcttcttaagggtgttgctaataatgctcatgctcttcagactggtgattttcgtactcctgctgagcttgctcttaataagtttgagaaggagtctggtcatattcgtaatcagcgtggtgattattctcatactttttctcgtaaggatcttcaggctgagcttattcttctttttgagaagcagaaggagtttggtaatcctcatgtttctggtggtcttaaggagggtattgagactcttcttatgactcagcgtcctgctctttctggtgatgctgttcagaagatgcttggtcattgtacttttgagcctgctgagcctaaggctgctaagaatacttatactgctgagcgttttatttggcttactaagcttaataatcttcgtattcttgagcagggttctgagcgtcctcttactgatactgagcgtgctactcttatggatgagccttatcgtaagtctaagcttacttatgctcaggctcgtaagcttcttggtcttgaggatactgctttttttaagggtcttcgttatggtaaggataatgctgaggcttctactcttatggagatgaaggcttatcatgctatttctcgtgctcttgagaaggagggtcttaaggataagaagtctcctcttaatctttcttctgagcttcaggatgagattggtactgctttttctctttttaagactgatgaggatattactggtcgtcttaaggatcgtgttcagcctgagattcttgaggctcttcttaagcatatttcttttgataagtttgttcagatttctcttaaggctcttcgtcgtattgttcctcttatggagcagggtaagcgttatgatgaggcttgtgctgagatttatggtgatcattatggtaagaagaatactgaggagaagatttatcttcctcctattcctgctgatgagattcgtaatcctgttgttcttcgtgctctttctcaggctcgtaaggttattaatggtgttgttcgtcgttatggttctcctgctcgtattcatattgagactgctcgtgaggttggtaagtcttttaaggatcgtaaggagattgagaagcgtcaggaggagaatcgtaaggatcgtgagaaggctgctgctaagtttcgtgagtattttcctaattttgttggtgagcctaagtctaaggatattcttaagcttcgtctttatgagcagcagcatggtaagtgtctttattctggtaaggagattaatcttgttcgtcttaatgagaagggttatgttgagattgatcatgctcttcctttttctcgtacttgggatgattcttttaataataaggttcttgttcttggttctgagaatcagaataagggtaatcagactccttatgagtattttaatggtaaggataattctcgtgagtggcaggagtttaaggctcgtgttgagacttctcgttttcctcgttctaagaagcagcgtattcttcttcagaagtttgatgaggatggttttaaggagtgtaatcttaatgatactcgttatgttaatcgttttctttgtcagtttgttgctgatcatattcttcttactggtaagggtaagcgtcgtgtttttgcttctaatggtcagattactaatcttcttcgtggtttttggggtcttcgtaaggttcgtgctgagaatgatcgtcatcatgctcttgatgctgttgttgttgcttgttctactgttgctatgcagcagaagattactcgttttgttcgttataaggagatgaatgcttttgatggtaagactattgataaggagactggtaaggttcttcatcagaagactcattttcctcagccttgggagttttttgctcaggaggttatgattcgtgtttttggtaagcctgatggtaagcctgagtttgaggaggctgatactcctgagaagcttcgtactcttcttgctgagaagctttcttctcgtcctgaggctgttcatgagtatgttactcctctttttgtttctcgtgctcctaatcgtaagatgtctggtgctcataaggatactcttcgttctgctaagcgttttgttaagcataatgagaagatttctgttaagcgtgtttggcttactgagattaagcttgctgatcttgagaatatggttaattataagaatggtcgtgagattgagctttatgaggctcttaaggctcgtcttgaggcttatggtggtaatgctaagcaggcttttgatcctaaggataatcctttttataagaagggtggtcagcttgttaaggctgttcgtgttgagaagactcaggagtctggtgttcttcttaataagaagaatgcttatactattgctgataatggtgatatggttcgtgttgatgttttttgtaaggttgataagaagggtaagaatcagtattttattgttcctatttatgcttggcaggttgctgagaatattcttcctgatattgattgtaagggttatcgtattgatgattcttatactttttgtttttctcttcataagtatgatcttattgcttttcagaaggatgagaagtctaaggttgagtttgcttattatattaattgtgattcttctaatggtcgtttttatcttgcttggcatgataagggttctaaggagcagcagtttcgtatttctactcagaatcttgttcttattcagaagtatcaggttaatgagcttggtaaggagattcgtccttgtcgtcttaagaagcgtcctcctgttcgttga

SEQ ID NO: 809 - DNA, 3249 bp, synthetic construct
  misc_feature 1..3249: note = Synthetic
  modified_base 3247: mod_base = OTHER; note = uracil
  source 1..3249: mol_type = other DNA
atggccgccttcaagcccaaccccatcaactacatcctgggcctggccatcggcatcgcctccgtgggctgggccatggtggagatcgacgaggaggagaaccccatccggctgatcgacctgggcgtgcgggtgttcgagcgggccgaggtgcccaagaccggcgactccctggccatggcccggcggctggcccggtccgtgcggcggctgacccggcggcgggcccaccggctgctgcgggcccggcggctgctgaagcgggagggcgtgctgcaggccgccgacttcgacgagaacggcctgatcaagtccctgcccaacaccccctggcagctgcgggccgccgccctggaccggaagctgacccccctggagtggtccgccgtgctgctgcacctgatcaagcaccggggctacctgtcccagcggaagaacgagggcgagaccgccgacaaggagctgggcgccctgctgaagggcgtggccaacaacgcccacgccctgcagaccggcgacttccggacccccgccgagctggccctgaacaagttcgagaaggagtccggccacatccggaaccagcggggcgactactcccacaccttctcccggaaggacctgcaggccgagctgatcctgctgttcgagaagcagaaggagttcggcaacccccacgtgtccggcggcctgaaggagggcatcgagaccctgctgatgacccagcggcccgccctgtccggcgacgccgtgcagaagatgctgggccactgcaccttcgagcccgccgagcccaaggccgccaagaacacctacaccgccgagcggttcatctggctgaccaagctgaacaacctgcggatcctggagcagggctccgagcggcccctgaccgacaccgagcgggccaccctgatggacgagccctaccggaagtccaagctgacctacgcccaggcccggaagctgctgggcctggaggacaccgccttcttcaagggcctgcggtacggcaaggacaacgccgaggcctccaccctgatggagatgaaggcctaccacgccatctcccgggccctggagaaggagggcctgaaggacaagaagtcccccctgaacctgtcctccgagctgcaggacgagatcggcaccgccttctccctgttcaagaccgacgaggacatcaccggccggctgaaggaccgggtgcagcccgagatcctggaggccctgctgaagcacatctccttcgacaagttcgtgcagatctccctgaaggccctgcggcggatcgtgcccctgatggagcagggcaagcggtacgacgaggcctgcgccgagatctacggcgaccactacggcaagaagaacaccgaggagaagatctacctgccccccatccccgccgacgagatccggaaccccgtggtgctgcgggccctgtcccaggcccggaaggtgatcaacggcgtggtgcggcggtacggctcccccgcccggatccacatcgagaccgcccgggaggtgggcaagtccttcaaggaccggaaggagatcgagaagcggcaggaggagaaccggaaggaccgggagaaggccgccgccaagttccgggagtacttccccaacttcgtgggcgagcccaagtccaaggacatcctgaagctgcggctgtacgagcagcagcacggcaagtgcctgtactccggcaaggagatcaacctggtgcggctgaacgagaagggctacgtggagatcgaccacgccctgcccttctcccggacctgggacgactccttcaacaacaaggtgctggtgctgggctccgagaaccagaacaagggcaaccagaccccctacgagtacttcaacggcaaggacaactcccgggagtggcaggagttcaaggcccgggtggagacctcccggttcccccggtccaagaagcagcggatcctgctgcagaagttcgacgaggacggcttcaaggagtgcaacctgaacgacacccggtacgtgaaccggttcctgtgccagttcgtggccgaccacatcctgctgaccggcaagggcaagcggcgggtgttcgcctccaacggccagatcaccaacctgctgcggggcttctggggcctgcggaaggtgcgggccgagaacgaccggcaccacgccctggacgccgtggtggtggcctgctccaccgtggccatgcagcagaagatcacccggttcgtgcggtacaaggagatgaacgccttcgacggcaagaccatcgacaaggagaccggcaaggtgctgcaccagaagacccacttcccccagccctgggagttcttcgcccaggaggtgatgatccgggtgttcggcaagcccgacggcaagcccgagttcgaggaggccgacacccccgagaagctgcggaccctgctggccgagaagctgtcctcccggcccgaggccgtgcacgagtacgtgacccccctgttcgtgtcccgggcccccaaccggaagatgtccggcgcccacaaggacaccctgcggtccgccaagcggttcgtgaagcacaacgagaagatctccgtgaagcgggtgtggctgaccgagatcaagctggccgacctggagaacatggtgaactacaagaacggccgggagatcgagctgtacgaggccctgaaggcccggctggaggcctacggcggcaacgccaagcaggccttcgaccccaaggacaaccccttctacaagaagggcggccagctggtgaaggccgtgcgggtggagaagacccaggagtccggcgtgctgctgaacaagaagaacgcctacaccatcgccgacaacggcgacatggtgcgggtggacgtgttctgcaaggtggacaagaagggcaagaaccagtacttcatcgtgcccatctacgcctggcaggtggccgagaacatcctgcccgacatcgactgcaagggctaccggatcgacgactcctacaccttctgcttctccctgcacaagtacgacctgatcgccttccagaaggacgagaagtccaaggtggagttcgcctactacatcaactgcgactcctccaacggccggttctacctggcctggcacgacaagggctccaaggagcagcagttccggatctccacccagaacctggtgctgatccagaagtaccaggtgaacgagctgggcaaggagatccggccctgccggctgaagaagcggccccccgtgcggtga

SEQ ID NO: 810 - DNA, 3249 bp, synthetic construct
  misc_feature 1..3249: note = Synthetic
  modified_base 3247: mod_base = OTHER; note = uracil
  source 1..3249: mol_type = other DNA
atggccgccttcaagcccaaccccatcaactacatcctgggcctggccatcggcatcgcctccgtgggctgggccatggtggagatcgacgaggaggagaaccccatccggctgatcgacctgggcgtgcgggtgttcgagcgggccgaggtgcccaagaccggcgactccctggccatggcccggcggctggcccggtccgtgcggcggctgacccggcggcgggcccaccggctgctgcgggcccggcggctgctgaagcgggagggcgtgctgcaggccgccgacttcgacgagaacggcctgatcaagtccctgcccaacaccccctggcagctgcgggccgccgccctggaccggaagctgacccccctggagtggtccgccgtgctgctgcacctgatcaagcaccggggctacctgtcccagcggaagaacgagggcgagaccgccgacaaggagctgggcgccctgctgaagggcgtggccaacaacgcccacgccctgcagaccggcgacttccggacccccgccgagctggccctgaacaagttcgagaaggagtccggccacatccggaaccagcggggcgactactcccacaccttctcccggaaggacctgcaggccgagctgatcctgctgttcgagaagcagaaggagttcggcaacccccacgtgtccggcggcctgaaggagggcatcgagaccctgctgatgacccagcggcccgccctgtccggcgacgccgtgcagaagatgctgggccactgcaccttcgagcccgccgagcccaaggccgccaagaacacctacaccgccgagcggttcatctggctgaccaagctgaacaacctgcggatcctggagcagggctccgagcggcccctgaccgacaccgagcgggccaccctgatggacgagccctaccggaagtccaagctgacctacgcccaggcccggaagctgctgggcctggaggacaccgccttcttcaagggcctgcggtacggcaaggacaacgccgaggcctccaccctgatggagatgaaggcctaccacgccatctcccgggccctggagaaggagggcctgaaggacaagaagtcccccctgaacctgtcctccgagctgcaggacgagatcggcaccgccttctccctgttcaagaccgacgaggacatcaccggccggctgaaggaccgggtgcagcccgagatcctggaggccctgctgaagcacatctccttcgacaagttcgtgcagatctccctgaaggccctgcggcggatcgtgcccctgatggagcagggcaagcggtacgacgaggcctgcgccgagatctacggcgaccactacggcaagaagaacaccgaggagaagatctacctgccccccatccccgccgacgagatccggaaccccgtggtgctgcgggccctgtcccaggcccggaaggtgatcaacggcgtggtgcggcggtacggctcccccgcccggatccacatcgagaccgcccgggaggtgggcaagtccttcaaggaccggaaggagatcgagaagcggcaggaggagaaccggaaggaccgggagaaggccgccgccaagttccgggagtacttccccaacttcgtgggcgagcccaagtccaaggacatcctgaagctgcggctgtacgagcagcagcacggcaagtgcctgtactccggcaaggagatcaacctggtgcggctgaacgagaagggctacgtggagatcgaccacgccctgcccttctcccggacctgggacgactccttcaacaacaaggtgctggtgctgggctccgagaaccagaacaagggcaaccagaccccctacgagtacttcaacggcaaggacaactcccgggagtggcaggagttcaaggcccgggtggagacctcccggttcccccggtccaagaagcagcggatcctgctgcagaagttcgacgaggacggcttcaaggagtgcaacctgaacgacacccggtacgtgaaccggttcctgtgccagttcgtggccgaccacatcctgctgaccggcaagggcaagcggcgggtgttcgcctccaacggccagatcaccaacctgctgcggggcttctggggcctgcggaaggtgcgggccgagaacgaccggcaccacgccctggacgccgtggtggtggcctgctccaccgtggccatgcagcagaagatcacccggttcgtgcggtacaaggagatgaacgccttcgacggcaagaccatcgacaaggagaccggcaaggtgctgcaccagaagacccacttcccccagccctgggagttcttcgcccaggaggtgatgatccgggtgttcggcaagcccgacggcaagcccgagttcgaggaggccgacacccccgagaagctgcggaccctgctggccgagaagctgtcctcccggcccgaggccgtgcacgagtacgtgacccccctgttcgtgtcccgggcccccaaccggaagatgtccggcgcccacaaggacaccctgcggtccgccaagcggttcgtgaagcacaacgagaagatctccgtgaagcgggtgtggctgaccgagatcaagctggccgacctggagaacatggtgaactacaagaacggccgggagatcgagctgtacgaggccctgaaggcccggctggaggcctacggcggcaacgccaagcaggccttcgaccccaaggacaaccccttctacaagaagggcggccagctggtgaaggccgtgcgggtggagaagacccaggagtccggcgtgctgctgaacaagaagaacgcctacaccatcgccgacaacggcgacatggtgcgggtggacgtgttctgcaaggtggacaagaagggcaagaaccagtacttcatcgtgcccatctacgcctggcaggtggccgagaacatcctgcccgacatcgactgcaagggctaccggatcgacgactcctacaccttctgcttctccctgcacaagtacgacctgatcgccttccagaaggacgagaagtccaaggtggagttcgcctactacatcaactgcgactcctccaacggccggttctacctggcctggcacgacaagggctccaaggagcagcagttccggatctccacccagaacctggtgctgatccagaagtaccaggtgaacgagctgggcaaggagatccggccctgccggctgaagaagcggccccccgtgcggtaa

SEQ ID NO: 811 - DNA, 4782 bp, synthetic construct
  misc_feature 1..4782: note = Synthetic
  source 1..4782: mol_type = other DNA
atggaggcctcccccgcctccggcccccggcacctgatggacccccacatcttcacctccaacttcaacaacggcatcggccggcacaagacctacctgtgctacgaggtggagcggctggacaacggcacctccgtgaagatggaccagcaccggggcttcctgcacaaccaggccaagaacctgctgtgcggcttctacggccggcacgccgagctgcggttcctggacctggtgccctccctgcagctggaccccgcccagatctaccgggtgacctggttcatctcctggtccccctgcttctcctggggctgcgccggcgaggtgcgggccttcctgcaggagaacacccacgtgcggctgcggatcttcgccgcccggatctacgactacgaccccctgtacaaggaggccctgcagatgctgcgggacgccggcgcccaggtgtccatcatgacctacgacgagttcaagcactgctgggacaccttcgtggaccaccagggctgccccttccagccctgggacggcctggacgagcactcccaggccctgtccggccggctgcgggccatcctgcagaaccagggcaactccggctccgagacccccggcacctccgagtccgccacccccgagtccgacaagaagtactccatcggcctggccatcggcaccaactccgtgggctgggccgtgatcaccgacgagtacaaggtgccctccaagaagttcaaggtgctgggcaacaccgaccggcactccatcaagaagaacctgatcggcgccctgctgttcgactccggcgagaccgccgaggccacccggctgaagcggaccgcccggcggcggtacacccggcggaagaaccggatctgctacctgcaggagatcttctccaacgagatggccaaggtggacgactccttcttccaccggctggaggagtccttcctggtggaggaggacaagaagcacgagcggcaccccatcttcggcaacatcgtggacgaggtggcctaccacgagaagtaccccaccatctaccacctgcggaagaagctggtggactccaccgacaaggccgacctgcggctgatctacctggccctggcccacatgatcaagttccggggccacttcctgatcgagggcgacctgaaccccgacaactccgacgtggacaagctgttcatccagctggtgcagacctacaaccagctgttcgaggagaaccccatcaacgcctccggcgtggacgccaaggccatcctgtccgcccggctgtccaagtcccggcggctggagaacctgatcgcccagctgcccggcgagaagaagaacggcctgttcggcaacctgatcgccctgtccctgggcctgacccccaacttcaagtccaacttcgacctggccgaggacgccaagctgcagctgtccaaggacacctacgacgacgacctggacaacctgctggcccagatcggcgaccagtacgccgacctgttcctggccgccaagaacctgtccgacgccatcctgctgtccgacatcctgcgggtgaacaccgagatcaccaaggcccccctgtccgcctccatgatcaagcggtacgacgagcaccaccaggacctgaccctgctgaaggccctggtgcggcagcagctgcccgagaagtacaaggagatcttcttcgaccagtccaagaacggctacgccggctacatcgacggcggcgcctcccaggaggagttctacaagttcatcaagcccatcctggagaagatggacggcaccgaggagctgctggtgaagctgaaccgggaggacctgctgcggaagcagcggaccttcgacaacggctccatcccccaccagatccacctgggcgagctgcacgccatcctgcggcggcaggaggacttctaccccttcctgaaggacaaccgggagaagatcgagaagatcctgaccttccggatcccctactacgtgggccccctggcccggggcaactcccggttcgcctggatgacccggaagtccgaggagaccatcaccccctggaacttcgaggaggtggtggacaagggcgcctccgcccagtccttcatcgagcggatgaccaacttcgacaagaacctgcccaacgagaaggtgctgcccaagcactccctgctgtacgagtacttcaccgtgtacaacgagctgaccaaggtgaagtacgtgaccgagggcatgcggaagcccgccttcctgtccggcgagcagaagaaggccatcgtggacctgctgttcaagaccaaccggaaggtgaccgtgaagcagctgaaggaggactacttcaagaagatcgagtgcttcgactccgtggagatctccggcgtggaggaccggttcaacgcctccctgggcacctaccacgacctgctgaagatcatcaaggacaaggacttcctggacaacgaggagaacgaggacatcctggaggacatcgtgctgaccctgaccctgttcgaggaccgggagatgatcgaggagcggctgaagacctacgcccacctgttcgacgacaaggtgatgaagcagctgaagcggcggcggtacaccggctggggccggctgtcccggaagctgatcaacggcatccgggacaagcagtccggcaagaccatcctggacttcctgaagtccgacggcttcgccaaccggaacttcatgcagctgatccacgacgactccctgaccttcaaggaggacatccagaaggcccaggtgtccggccagggcgactccctgcacgagcacatcgccaacctggccggctcccccgccatcaagaagggcatcctgcagaccgtgaaggtggtggacgagctggtgaaggtgatgggccggcacaagcccgagaacatcgtgatcgagatggcccgggagaaccagaccacccagaagggccagaagaactcccgggagcggatgaagcggatcgaggagggcatcaaggagctgggctcccagatcctgaaggagcaccccgtggagaacacccagctgcagaacgagaagctgtacctgtactacctgcagaacggccgggacatgtacgtggaccaggagctggacatcaaccggctgtccgactacgacgtggaccacatcgtgccccagtccttcctgaaggacgactccatcgacaacaaggtgctgacccggtccgacaagaaccggggcaagtccgacaacgtgccctccgaggaggtggtgaagaagatgaagaactactggcggcagctgctgaacgccaagctgatcacccagcggaagttcgacaacctgaccaaggccgagcggggcggcctgtccgagctggacaaggccggcttcatcaagcggcagctggtggagacccggcagatcaccaagcacgtggcccagatcctggactcccggatgaacaccaagtacgacgagaacgacaagctgatccgggaggtgaaggtgatcaccctgaagtccaagctggtgtccgacttccggaaggacttccagttctacaaggtgcgggagatcaacaactaccaccacgcccacgacgcctacctgaacgccgtggtgggcaccgccctgatcaagaagtaccccaagctggagtccgagttcgtgtacggcgactacaaggtgtacgacgtgcggaagatgatcgccaagtccgagcaggagatcggcaaggccaccgccaagtacttcttctactccaacatcatgaacttcttcaagaccgagatcaccctggccaacggcgagatccggaagcggcccctgatcgagaccaacggcgagaccggcgagatcgtgtgggacaagggccgggacttcgccaccgtgcggaaggtgctgtccatgccccaggtgaacatcgtgaagaagaccgaggtgcagaccggcggcttctccaaggagtccatcctgcccaagcggaactccgacaagctgatcgcccggaagaaggactgggaccccaagaagtacggcggcttcgactcccccaccgtggcctactccgtgctggtggtggccaaggtggagaagggcaagtccaagaagctgaagtccgtgaaggagctgctgggcatcaccatcatggagcggtcctccttcgagaagaaccccatcgacttcctggaggccaagggctacaaggaggtgaagaaggacctgatcatcaagctgcccaagtactccctgttcgagctggagaacggccggaagcggatgctggcctccgccggcgagctgcagaagggcaacgagctggccctgccctccaagtacgtgaacttcctgtacctggcctcccactacgagaagctgaagggctcccccgaggacaacgagcagaagcagctgttcgtggagcagcacaagcactacctggacgagatcatcgagcagatctccgagttctccaagcgggtgatcctggccgacgccaacctggacaaggtgctgtccgcctacaacaagcaccgggacaagcccatccgggagcaggccgagaacatcatccacctgttcaccctgaccaacctgggcgcccccgccgccttcaagtacttcgacaccaccatcgaccggaagcggtacacctccaccaaggaggtgctggacgccaccctgatccaccagtccatcaccggcctgtacgagacccggatcgacctgtcccagctgggcggcgacggcggcggctcccccaagaagaagcggaaggtgtga

SEQ ID NO: 812 - DNA, 4839 bp, synthetic construct
  misc_feature 1..4839: note = Synthetic
  source 1..4839: mol_type = other DNA
atggaggcctcccccgcctccggcccccggcacctgatggacccccacatcttcacctccaacttcaacaacggcatcggccggcacaagacctacctgtgctacgaggtggagcggctggacaacggcacctccgtgaagatggaccagcaccggggcttcctgcacaaccaggccaagaacctgctgtgcggcttctacggccggcacgccgagctgcggttcctggacctggtgccctccctgcagctggaccccgcccagatctaccgggtgacctggttcatctcctggtccccctgcttctcctggggctgcgccggcgaggtgcgggccttcctgcaggagaacacccacgtgcggctgcggatcttcgccgcccggatctacgactacgaccccctgtacaaggaggccctgcagatgctgcgggacgccggcgcccaggtgtccatcatgacctacgacgagttcaagcactgctgggacaccttcgtggaccaccagggctgccccttccagccctgggacggcctggacgagcactcccaggccctgtccggccggctgcgggccatcctgcagaaccagggcaactccggctccgagacccccggcacctccgagtccgccacccccgagtccgacaagaagtactccatcggcctggccatcggcaccaactccgtgggctgggccgtgatcaccgacgagtacaaggtgccctccaagaagttcaaggtgctgggcaacaccgaccggcactccatcaagaagaacctgatcggcgccctgctgttcgactccggcgagaccgccgaggccacccggctgaagcggaccgcccggcggcggtacacccggcggaagaaccggatctgctacctgcaggagatcttctccaacgagatggccaaggtggacgactccttcttccaccggctggaggagtccttcctggtggaggaggacaagaagcacgagcggcaccccatcttcggcaacatcgtggacgaggtggcctaccacgagaagtaccccaccatctaccacctgcggaagaagctggtggactccaccgacaaggccgacctgcggctgatctacctggccctggcccacatgatcaagttccggggccacttcctgatcgagggcgacctgaaccccgacaactccgacgtggacaagctgttcatccagctggtgcagacctacaaccagctgttcgaggagaaccccatcaacgcctccggcgtggacgccaaggccatcctgtccgcccggctgtccaagtcccggcggctggagaacctgatcgcccagctgcccggcgagaagaagaacggcctgttcggcaacctgatcgccctgtccctgggcctgacccccaacttcaagtccaacttcgacctggccgaggacgccaagctgcagctgtccaaggacacctacgacgacgacctggacaacctgctggcccagatcggcgaccagtacgccgacctgttcctggccgccaagaacctgtccgacgccatcctgctgtccgacatcctgcgggtgaacaccgagatcaccaaggcccccctgtccgcctccatgatcaagcggtacgacgagcaccaccaggacctgaccctgctgaaggccctggtgcggcagcagctgcccgagaagtacaaggagatcttcttcgaccagtccaagaacggctacgccggctacatcgacggcggcgcctcccaggaggagttctacaagttcatcaagcccatcctggagaagatggacggcaccgaggagctgctggtgaagctgaaccgggaggacctgctgcggaagcagcggaccttcgacaacggctccatcccccaccagatccacctgggcgagctgcacgccatcctgcggcggcaggaggacttctaccccttcctgaaggacaaccgggagaagatcgagaagatcctgaccttccggatcccctactacgtgggccccctggcccggggcaactcccggttcgcctggatgacccggaagtccgaggagaccatcaccccctggaacttcgaggaggtggtggacaagggcgcctccgcccagtccttcatcgagcggatgaccaacttcgacaagaacctgcccaacgagaaggtgctgcccaagcactccctgctgtacgagtacttcaccgtgtacaacgagctgaccaaggtgaagtacgtgaccgagggcatgcggaagcccgccttcctgtccggcgagcagaagaaggccatcgtggacctgctgttcaagaccaaccggaaggtgaccgtgaagcagctgaaggaggactacttcaagaagatcgagtgcttcgactccgtggagatctccggcgtggaggaccggttcaacgcctccctgggcacctaccacgacctgctgaagatcatcaaggacaaggacttcctggacaacgaggagaacgaggacatcctggaggacatcgtgctgaccctgaccctgttcgaggaccgggagatgatcgaggagcggctgaagacctacgcccacctgttcgacgacaaggtgatgaagcagctgaagcggcggcggtacaccggctggggccggctgtcccggaagctgatcaacggcatccgggacaagcagtccggcaagaccatcctggacttcctgaagtccgacggcttcgccaaccggaacttcatgcagctgatccacgacgactccctgaccttcaaggaggacatccagaaggcccaggtgtccggccagggcgactccctgcacgagcacatcgccaacctggccggctcccccgccatcaagaagggcatcctgcagaccgtgaaggtggtggacgagctggtgaaggtgatgggccggcacaagcccgagaacatcgtgatcgagatggcccgggagaaccagaccacccagaagggccagaagaactcccgggagcggatgaagcggatcgaggagggcatcaaggagctgggctcccagatcctgaaggagcaccccgtggagaacacccagctgcagaacgagaagctgtacctgtactacctgcagaacggccgggacatgtacgtggaccaggagctggacatcaaccggctgtccgactacgacgtggaccacatcgtgccccagtccttcctgaaggacgactccatcgacaacaaggtgctgacccggtccgacaagaaccggggcaagtccgacaacgtgccctccgaggaggtggtgaagaagatgaagaactactggcggcagctgctgaacgccaagctgatcacccagcggaagttcgacaacctgaccaaggccgagcggggcggcctgtccgagctggacaaggccggcttcatcaagcggcagctggtggagacccggcagatcaccaagcacgtggcccagatcctggactcccggatgaacaccaagtacgacgagaacgacaagctgatccgggaggtgaaggtgatcaccctgaagtccaagctggtgtccgacttccggaaggacttccagttctacaaggtgcgggagatcaacaactaccaccacgcccacgacgcctacctgaacgccgtggtgggcaccgccctgatcaagaagtaccccaagctggagtccgagttcgtgtacggcgactacaaggtgtacgacgtgcggaagatgatcgccaagtccgagcaggagatcggcaaggccaccgccaagtacttcttctactccaacatcatgaacttcttcaagaccgagatcaccctggccaacggcgagatccggaagcggcccctgatcgagaccaacggcgagaccggcgagatcgtgtgggacaagggccgggacttcgccaccgtgcggaaggtgctgtccatgccccaggtgaacatcgtgaagaagaccgaggtgcagaccggcggcttctccaaggagtccatcctgcccaagcggaactccgacaagctgatcgcccggaagaaggactgggaccccaagaagtacggcggcttcgactcccccaccgtggcctactccgtgctggtggtggccaaggtggagaagggcaagtccaagaagctgaagtccgtgaaggagctgctgggcatcaccatcatggagcggtcctccttcgagaagaaccccatcgacttcctggaggccaagggctacaaggaggtgaagaaggacctgatcatcaagctgcccaagtactccctgttcgagctggagaacggccggaagcggatgctggcctccgccggcgagctgcagaagggcaacgagctggccctgccctccaagtacgtgaacttcctgtacctggcctcccactacgagaagctgaagggctcccccgaggacaacgagcagaagcagctgttcgtggagcagcacaagcactacctggacgagatcatcgagcagatctccgagttctccaagcgggtgatcctggccgacgccaacctggacaaggtgctgtccgcctacaacaagcaccgggacaagcccatccgggagcaggccgagaacatcatccacctgttcaccctgaccaacctgggcgcccccgccgccttcaagtacttcgacaccaccatcgaccggaagcggtacacctccaccaaggaggtgctggacgccaccctgatccaccagtccatcaccggcctgtacgagacccggatcgacctgtcccagctgggcggcgacggcggcggctcccccaagaagaagcggaaggtgtccgagtccgccacccccgagtccgtgtccggctggcggctgttcaagaagatctcctga

SEQ ID NO: 813 - DNA, 4140 bp, synthetic construct
  misc_feature 1..4140: note = Synthetic
  source 1..4140: mol_type = other DNA
atggacaagaagtactccatcggcctggacatcggcaccaactccgtgggctgggccgtgatcaccgacgagtacaaggtgccctccaagaagttcaaggtgctgggcaacaccgaccggcactccatcaagaagaacctgatcggcgccctgctgttcgactccggcgagaccgccgaggccacccggctgaagcggaccgcccggcggcggtacacccggcggaagaaccggatctgctacctgcaggagatcttctccaacgagatggccaaggtggacgactccttcttccaccggctggaggagtccttcctggtggaggaggacaagaagcacgagcggcaccccatcttcggcaacatcgtggacgaggtggcctaccacgagaagtaccccaccatctaccacctgcggaagaagctggtggactccaccgacaaggccgacctgcggctgatctacctggccctggcccacatgatcaagttccggggccacttcctgatcgagggcgacctgaaccccgacaactccgacgtggacaagctgttcatccagctggtgcagacctacaaccagctgttcgaggagaaccccatcaacgcctccggcgtggacgccaaggccatcctgtccgcccggctgtccaagtcccggcggctggagaacctgatcgcccagctgcccggcgagaagaagaacggcctgttcggcaacctgatcgccctgtccctgggcctgacccccaacttcaagtccaacttcgacctggccgaggacgccaagctgcagctgtccaaggacacctacgacgacgacctggacaacctgctggcccagatcggcgaccagtacgccgacctgttcctggccgccaagaacctgtccgacgccatcctgctgtccgacatcctgcgggtgaacaccgagatcaccaaggcccccctgtccgcctccatgatcaagcggtacgacgagcaccaccaggacctgaccctgctgaaggccctggtgcggcagcagctgcccgagaagtacaaggagatcttcttcgaccagtccaagaacggctacgccggctacatcgacggcggcgcctcccaggaggagttctacaagttcatcaagcccatcctggagaagatggacggcaccgaggagctgctggtgaagctgaaccgggaggacctgctgcggaagcagcggaccttcgacaacggctccatcccccaccagatccacctgggcgagctgcacgccatcctgcggcggcaggaggacttctaccccttcctgaaggacaaccgggagaagatcgagaagatcctgaccttccggatcccctactacgtgggccccctggcccggggcaactcccggttcgcctggatgacccggaagtccgaggagaccatcaccccctggaacttcgaggaggtggtggacaagggcgcctccgcccagtccttcatcgagcggatgaccaacttcgacaagaacctgcccaacgagaaggtgctgcccaagcactccctgctgtacgagtacttcaccgtgtacaacgagctgaccaaggtgaagtacgtgaccgagggcatgcggaagcccgccttcctgtccggcgagcagaagaaggccatcgtggacctgctgttcaagaccaaccggaaggtgaccgtgaagcagctgaaggaggactacttcaagaagatcgagtgcttcgactccgtggagatctccggcgtggaggaccggttcaacgcctccctgggcacctaccacgacctgctgaagatcatcaaggacaaggacttcctggacaacgaggagaacgaggacatcctggaggacatcgtgctgaccctgaccctgttcgaggaccgggagatgatcgaggagcggctgaagacctacgcccacctgttcgacgacaaggtgatgaagcagctgaagcggcggcggtacaccggctggggccggctgtcccggaagctgatcaacggcatccgggacaagcagtccggcaagaccatcctggacttcctgaagtccgacggcttcgccaaccggaacttcatgcagctgatccacgacgactccctgaccttcaaggaggacatccagaaggcccaggtgtccggccagggcgactccctgcacgagcacatcgccaacctggccggctcccccgccatcaagaagggcatcctgcagaccgtgaaggtggtggacgagctggtgaaggtgatgggccggcacaagcccgagaacatcgtgatcgagatggcccgggagaaccagaccacccagaagggccagaagaactcccgggagcggatgaagcggatcgaggagggcatcaaggagctgggctcccagatcctgaaggagcaccccgtggagaacacccagctgcagaacgagaagctgtacctgtactacctgcagaacggccgggacatgtacgtggaccaggagctggacatcaaccggctgtccgactacgacgtggaccacatcgtgccccagtccttcctgaaggacgactccatcgacaacaaggtgctgacccggtccgacaagaaccggggcaagtccgacaacgtgccctccgaggaggtggtgaagaagatgaagaactactggcggcagctgctgaacgccaagctgatcacccagcggaagttcgacaacctgaccaaggccgagcggggcggcctgtccgagctggacaaggccggcttcatcaagcggcagctggtggagacccggcagatcaccaagcacgtggcccagatcctggactcccggatgaacaccaagtacgacgagaacgacaagctgatccgggaggtgaaggtgatcaccctgaagtccaagctggtgtccgacttccggaaggacttccagttctacaaggtgcgggagatcaacaactaccaccacgcccacgacgcctacctgaacgccgtggtgggcaccgccctgatcaagaagtaccccaagctggagtccgagttcgtgtacggcgactacaaggtgtacgacgtgcggaagatgatcgccaagtccgagcaggagatcggcaaggccaccgccaagtacttcttctactccaacatcatgaacttcttcaagaccgagatcaccctggccaacggcgagatccggaagcggcccctgatcgagaccaacggcgagaccggcgagatcgtgtgggacaagggccgggacttcgccaccgtgcggaaggtgctgtccatgccccaggtgaacatcgtgaagaagaccgaggtgcagaccggcggcttctccaaggagtccatcctgcccaagcggaactccgacaagctgatcgcccggaagaaggactgggaccccaagaagtacggcggcttcgactcccccaccgtggcctactccgtgctggtggtggccaaggtggagaagggcaagtccaagaagctgaagtccgtgaaggagctgctgggcatcaccatcatggagcggtcctccttcgagaagaaccccatcgacttcctggaggccaagggctacaaggaggtgaagaaggacctgatcatcaagctgcccaagtactccctgttcgagctggagaacggccggaagcggatgctggcctccgccggcgagctgcagaagggcaacgagctggccctgccctccaagtacgtgaacttcctgtacctggcctcccactacgagaagctgaagggctcccccgaggacaacgagcagaagcagctgttcgtggagcagcacaagcactacctggacgagatcatcgagcagatctccgagttctccaagcgggtgatcctggccgacgccaacctggacaaggtgctgtccgcctacaacaagcaccgggacaagcccatccgggagcaggccgagaacatcatccacctgttcaccctgaccaacctgggcgcccccgccgccttcaagtacttcgacaccaccatcgaccggaagcggtacacctccaccaaggaggtgctggacgccaccctgatccaccagtccatcaccggcctgtacgagacccggatcgacctgtcccagctgggcggcgacggcggcggctcccccaagaagaagcggaaggtgtga

SEQ ID NO: 814 - DNA, 4197 bp, synthetic construct
  misc_feature 1..4197: note = Synthetic
  source 1..4197: mol_type = other DNA
atggacaagaagtactccatcggcctggacatcggcaccaactccgtgggctgggccgtgatcaccgacgagtacaaggtgccctccaagaagttcaaggtgctgggcaacaccgaccggcactccatcaagaagaacctgatcggcgccctgctgttcgactccggcgagaccgccgaggccacccggctgaagcggaccgcccggcggcggtacacccggcggaagaaccggatctgctacctgcaggagatcttctccaacgagatggccaaggtggacgactccttcttccaccggctggaggagtccttcctggtggaggaggacaagaagcacgagcggcaccccatcttcggcaacatcgtggacgaggtggcctaccacgagaagtaccccaccatctaccacctgcggaagaagctggtggactccaccgacaaggccgacctgcggctgatctacctggccctggcccacatgatcaagttccggggccacttcctgatcgagggcgacctgaaccccgacaactccgacgtggacaagctgttcatccagctggtgcagacctacaaccagctgttcgaggagaaccccatcaacgcctccggcgtggacgccaaggccatcctgtccgcccggctgtccaagtcccggcggctggagaacctgatcgcccagctgcccggcgagaagaagaacggcctgttcggcaacctgatcgccctgtccctgggcctgacccccaacttcaagtccaacttcgacctggccgaggacgccaagctgcagctgtccaaggacacctacgacgacgacctggacaacctgctggcccagatcggcgaccagtacgccgacctgttcctggccgccaagaacctgtccgacgccatcctgctgtccgacatcctgcgggtgaacaccgagatcaccaaggcccccctgtccgcctccatgatcaagcggtacgacgagcaccaccaggacctgaccctgctgaaggccctggtgcggcagcagctgcccgagaagtacaaggagatcttcttcgaccagtccaagaacggctacgccggctacatcgacggcggcgcctcccaggaggagttctacaagttcatcaagcccatcctggagaagatggacggcaccgaggagctgctggtgaagctgaaccgggaggacctgctgcggaagcagcggaccttcgacaacggctccatcccccaccagatccacctgggcgagctgcacgccatcctgcggcggcaggaggacttctaccccttcctgaaggacaaccgggagaagatcgagaagatcctgaccttccggatcccctactacgtgggccccctggcccggggcaactcccggttcgcctggatgacccggaagtccgaggagaccatcaccccctggaacttcgaggaggtggtggacaagggcgcctccgcccagtccttcatcgagcggatgaccaacttcgacaagaacctgcccaacgagaaggtgctgcccaagcactccctgctgtacgagtacttcaccgtgtacaacgagctgaccaaggtgaagtacgtgaccgagggcatgcggaagcccgccttcctgtccggcgagcagaagaaggccatcgtggacctgctgttcaagaccaaccggaaggtgaccgtgaagcagctgaaggaggactacttcaagaagatcgagtgcttcgactccgtggagatctccggcgtggaggaccggttcaacgcctccctgggcacctaccacgacctgctgaagatcatcaaggacaaggacttcctggacaacgaggagaacgaggacatcctggaggacatcgtgctgaccctgaccctgttcgaggaccgggagatgatcgaggagcggctgaagacctacgcccacctgttcgacgacaaggtgatgaagcagctgaagcggcggcggtacaccggctggggccggctgtcccggaagctgatcaacggcatccgggacaagcagtccggcaagaccatcctggacttcctgaagtccgacggcttcgccaaccggaacttcatgcagctgatccacgacgactccctgaccttcaaggaggacatccagaaggcccaggtgtccggccagggcgactccctgcacgagcacatcgccaacctggccggctcccccgccatcaagaagggcatcctgcagaccgtgaaggtggtggacgagctggtgaaggtgatgggccggcacaagcccgagaacatcgtgatcgagatggcccgggagaaccagaccacccagaagggccagaagaactcccgggagcggatgaagcggatcgaggagggcatcaaggagctgggctcccagatcctgaaggagcaccccgtggagaacacccagctgcagaacgagaagctgtacctgtactacctgcagaacggccgggacatgtacgtggaccaggagctggacatcaaccggctgtccgactacgacgtggaccacatcgtgccccagtccttcctgaaggacgactccatcgacaacaaggtgctgacccggtccgacaagaaccggggcaagtccgacaacgtgccctccgaggaggtggtgaagaagatgaagaactactggcggcagctgctgaacgccaagctgatcacccagcggaagttcgacaacctgaccaaggccgagcggggcggcctgtccgagctggacaaggccggcttcatcaagcggcagctggtggagacccggcagatcaccaagcacgtggcccagatcctggactcccggatgaacaccaagtacgacgagaacgacaagctgatccgggaggtgaaggtgatcaccctgaagtccaagctggtgtccgacttccggaaggacttccagttctacaaggtgcgggagatcaacaactaccaccacgcccacgacgcctacctgaacgccgtggtgggcaccgccctgatcaagaagtaccccaagctggagtccgagttcgtgtacggcgactacaaggtgtacgacgtgcggaagatgatcgccaagtccgagcaggagatcggcaaggccaccgccaagtacttcttctactccaacatcatgaacttcttcaagaccgagatcaccctggccaacggcgagatccggaagcggcccctgatcgagaccaacggcgagaccggcgagatcgtgtgggacaagggccgggacttcgccaccgtgcggaaggtgctgtccatgccccaggtgaacatcgtgaagaagaccgaggtgcagaccggcggcttctccaaggagtccatcctgcccaagcggaactccgacaagctgatcgcccggaagaaggactgggaccccaagaagtacggcggcttcgactcccccaccgtggcctactccgtgctggtggtggccaaggtggagaagggcaagtccaagaagctgaagtccgtgaaggagctgctgggcatcaccatcatggagcggtcctccttcgagaagaaccccatcgacttcctggaggccaagggctacaaggaggtgaagaaggacctgatcatcaagctgcccaagtactccctgttcgagctggagaacggccggaagcggatgctggcctccgccggcgagctgcagaagggcaacgagctggccctgccctccaagtacgtgaacttcctgtacctggcctcccactacgagaagctgaagggctcccccgaggacaacgagcagaagcagctgttcgtggagcagcacaagcactacctggacgagatcatcgagcagatctccgagttctccaagcgggtgatcctggccgacgccaacctggacaaggtgctgtccgcctacaacaagcaccgggacaagcccatccgggagcaggccgagaacatcatccacctgttcaccctgaccaacctgggcgcccccgccgccttcaagtacttcgacaccaccatcgaccggaagcggtacacctccaccaaggaggtgctggacgccaccctgatccaccagtccatcaccggcctgtacgagacccggatcgacctgtcccagctgggcggcgacggcggcggctcccccaagaagaagcggaaggtgtccgagtccgccacccccgagtccgtgtccggctggcggctgttcaagaagatctcctga

SEQ ID NO: 815 - DNA, 5427 bp, synthetic construct
  misc_feature 1..5427: note = Synthetic
  source 1..5427: mol_type = other DNA
atggaggcctcccccgcctccggcccccggcacctgatggacccccacatcttcacctccaacttcaacaacggcatcggccggcacaagacctacctgtgctacgaggtggagcggctggacaacggcacctccgtgaagatggaccagcaccggggcttcctgcacaaccaggccaagaacctgctgtgcggcttctacggccggcacgccgagctgcggttcctggacctggtgccctccctgcagctggaccccgcccagatctaccgggtgacctggttcatctcctggtccccctgcttctcctggggctgcgccggcgaggtgcgggccttcctgcaggagaacacccacgtgcggctgcggatcttcgccgcccggatctacgactacgaccccctgtacaaggaggccctgcagatgctgcgggacgccggcgcccaggtgtccatcatgacctacgacgagttcaagcactgctgggacaccttcgtggaccaccagggctgccccttccagccctgggacggcctggacgagcactcccaggccctgtccggccggctgcgggccatcctgcagaaccagggcaactccggctccgagacccccggcacctccgagtccgccacccccgagtccgacaagaagtactccatcggcctggccatcggcaccaactccgtgggctgggccgtgatcaccgacgagtacaaggtgccctccaagaagttcaaggtgctgggcaacaccgaccggcactccatcaagaagaacctgatcggcgccctgctgttcgactccggcgagaccgccgaggccacccggctgaagcggaccgcccggcggcggtacacccggcggaagaaccggatctgctacctgcaggagatcttctccaacgagatggccaaggtggacgactccttcttccaccggctggaggagtccttcctggtggaggaggacaagaagcacgagcggcaccccatcttcggcaacatcgtggacgaggtggcctaccacgagaagtaccccaccatctaccacctgcggaagaagctggtggactccaccgacaaggccgacctgcggctgatctacctggccctggcccacatgatcaagttccggggccacttcctgatcgagggcgacctgaaccccgacaactccgacgtggacaagctgttcatccagctggtgcagacctacaaccagctgttcgaggagaaccccatcaacgcctccggcgtggacgccaaggccatcctgtccgcccggctgtccaagtcccggcggctggagaacctgatcgcccagctgcccggcgagaagaagaacggcctgttcggcaacctgatcgccctgtccctgggcctgacccccaacttcaagtccaacttcgacctggccgaggacgccaagctgcagctgtccaaggacacctacgacgacgacctggacaacctgctggcccagatcggcgaccagtacgccgacctgttcctggccgccaagaacctgtccgacgccatcctgctgtccgacatcctgcgggtgaacaccgagatcaccaaggcccccctgtccgcctccatgatcaagcggtacgacgagcaccaccaggacctgaccctgctgaaggccctggtgcggcagcagctgcccgagaagtacaaggagatcttcttcgaccagtccaagaacggctacgccggctacatcgacggcggcgcctcccaggaggagttctacaagttcatcaagcccatcctggagaagatggacggcaccgaggagctgctggtgaagctgaaccgggaggacctgctgcggaagcagcggaccttcgacaacggctccatcccccaccagatccacctgggcgagctgcacgccatcctgcggcggcaggaggacttctaccccttcctgaaggacaaccgggagaagatcgagaagatcctgaccttccggatcccctactacgtgggccccctggcccggggcaactcccggttcgcctggatgacccggaagtccgaggagaccatcaccccctggaacttcgaggaggtggtggacaagggcgcctccgcccagtccttcatcgagcggatgaccaacttcgacaagaacctgcccaacgagaaggtgctgcccaagcactccctgctgtacgagtacttcaccgtgtacaacgagctgaccaaggtgaagtacgtgaccgagggcatgcggaagcccgccttcctgtccggcgagcagaagaaggccatcgtggacctgctgttcaagaccaaccggaaggtgaccgtgaagcagctgaaggaggactacttcaagaagatcgagtgcttcgactccgtggagatctccggcgtggaggaccggttcaacgcctccctgggcacctaccacgacctgctgaagatcatcaaggacaaggacttcctggacaacgaggagaacgaggacatcctggaggacatcgtgctgaccctgaccctgttcgaggaccgggagatgatcgaggagcggctgaagacctacgcccacctgttcgacgacaaggtgatgaagcagctgaagcggcggcggtacaccggctggggccggctgtcccggaagctgatcaacggcatccgggacaagcagtccggcaagaccatcctggacttcctgaagtccgacggcttcgccaaccggaacttcatgcagctgatccacgacgactccctgaccttcaaggaggacatccagaaggcccaggtgtccggccagggcgactccctgcacgagcacatcgccaacctggccggctcccccgccatcaagaagggcatcctgcagaccgtgaaggtggtggacgagctggtgaaggtgatgggccggcacaagcccgagaacatcgtgatcgagatggcccgggagaaccagaccacccagaagggccagaagaactcccgggagcggatgaagcggatcgaggagggcatcaaggagctgggctcccagatcctgaaggagcaccccgtggagaacacccagctgcagaacgagaagctgtacctgtactacctgcagaacggccgggacatgtacgtggaccaggagctggacatcaaccggctgtccgactacgacgtggaccacatcgtgccccagtccttcctgaaggacgactccatcgacaacaaggtgctgacccggtccgacaagaaccggggcaagtccgacaacgtgccctccgaggaggtggtgaagaagatgaagaactactggcggcagctgctgaacgccaagctgatcacccagcggaagttcgacaacctgaccaaggccgagcggggcggcctgtccgagctggacaaggccggcttcatcaagcggcagctggtggagacccggcagatcaccaagcacgtggcccagatcctggactcccggatgaacaccaagtacgacgagaacgacaagctgatccgggaggtgaaggtgatcaccctgaagtccaagctggtgtccgacttccggaaggacttccagttctacaaggtgcgggagatcaacaactaccaccacgcccacgacgcctacctgaacgccgtggtgggcaccgccctgatcaagaagtaccccaagctggagtccgagttcgtgtacggcgactacaaggtgtacgacgtgcggaagatgatcgccaagtccgagcaggagatcggcaaggccaccgccaagtacttcttctactccaacatcatgaacttcttcaagaccgagatcaccctggccaacggcgagatccggaagcggcccctgatcgagaccaacggcgagaccggcgagatcgtgtgggacaagggccgggacttcgccaccgtgcggaaggtgctgtccatgccccaggtgaacatcgtgaagaagaccgaggtgcagaccggcggcttctccaaggagtccatcctgcccaagcggaactccgacaagctgatcgcccggaagaaggactgggaccccaagaagtacggcggcttcgactcccccaccgtggcctactccgtgctggtggtggccaaggtggagaagggcaagtccaagaagctgaagtccgtgaaggagctgctgggcatcaccatcatggagcggtcctccttcgagaagaaccccatcgacttcctggaggccaagggctacaaggaggtgaagaaggacctgatcatcaagctgcccaagtactccctgttcgagctggagaacggccggaagcggatgctggcctccgccggcgagctgcagaagggcaacgagctggccctgccctccaagtacgtgaacttcctgtacctggcctcccactacgagaagctgaagggctcccccgaggacaacgagcagaagcagctgttcgtggagcagcacaagcactacctggacgagatcatcgagcagatctccgagttctccaagcgggtgatcctggccgacgccaacctggacaaggtgctgtccgcctacaacaagcaccgggacaagcccatccgggagcaggccgagaacatcatccacctgttcaccctgaccaacctgggcgcccccgccgccttcaagtacttcgacaccaccatcgaccggaagcggtacacctccaccaaggaggtgctggacgccaccctgatccaccagtccatcaccggcctgtacgagacccggatcgacctgtcccagctgggcggcgactccggcggctccggcggctccggcggctccaccaacctgtccgacatcatcgagaaggagaccggcaagcagctggtgatccaggagtccatcctgatgctgcccgaggaggtggaggaggtgatcggcaacaagcccgagtccgacatcctggtgcacaccgcctacgacgagtccaccgacgagaacgtgatgctgctgacctccgacgcccccgagtacaagccctgggccctggtgatccaggactccaacggcgagaacaagatcaagatgctgtccggcggctccggcggctccggcggctccaccaacctgtccgacatcatcgagaaggagaccggcaagcagctggtgatccaggagtccatcctgatgctgcccgaggaggtggaggaggtgatcggcaacaagcccgagtccgacatcctggtgcacaccgcctacgacgagtccaccgacgagaacgtgatgctgctgacctccgacgcccccgagtacaagccctgggccctggtgatccaggactccaacggcgagaacaagatcaagatgctgtccggcggctccaagcggaccgccgacggctccgagttcgagcccaagaagaagcggaaggtgtccgagtccgccacccccgagtccgtgtccggctggcggctgttcaagaagatctcctga

SEQ ID NO: 816 - DNA, 4140 bp, synthetic construct
  misc_feature 1..4140: note = Synthetic
  source 1..4140: mol_type = other DNA
atggacaagaagtacagcatcggactggacatcggaacaaacagcgtcggatgggcagtcatcacagacgaatacaaggtcccgagcaagaagttcaaggtcctgggaaacacagacagacacagcatcaagaagaacctgatcggagcactgctgttcgacagcggagaaacagcagaagcaacaagactgaagagaacagcaagaagaagatacacaagaagaaagaacagaatctgctacctgcaggaaatcttcagcaacgaaatggcaaaggtcgacgacagcttcttccacagactggaagaaagcttcctggtcgaagaagacaagaagcacgaaagacacccgatcttcggaaacatcgtcgacgaagtcgcataccacgaaaagtacccgacaatctaccacctgagaaagaagctggtcgacagcacagacaaggcagacctgagactgatctacctggcactggcacacatgatcaagttcagaggacacttcctgatcgaaggagacctgaacccggacaacagcgacgtcgacaagctgttcatccagctggtccagacatacaaccagctgttcgaagaaaacccgatcaacgcaagcggagtcgacgcaaaggcaatcctgagcgcaagactgagcaagagcagaagactggaaaacctgatcgcacagctgccgggagaaaagaagaacggactgttcggaaacctgatcgcactgagcctgggactgacaccgaacttcaagagcaacttcgacctggcagaagacgcaaagctgcagctgagcaaggacacatacgacgacgacctggacaacctgctggcacagatcggagaccagtacgcagacctgttcctggcagcaaagaacctgagcgacgcaatcctgctgagcgacatcctgagagtcaacacagaaatcacaaaggcaccgctgagcgcaagcatgatcaagagatacgacgaacaccaccaggacctgacactgctgaaggcactggtcagacagcagctgccggaaaagtacaaggaaatcttcttcgaccagagcaagaacggatacgcaggatacatcgacggaggagcaagccaggaagaattctacaagttcatcaagccgatcctggaaaagatggacggaacagaagaactgctggtcaagctgaacagagaagacctgctgagaaagcagagaacattcgacaacggaagcatcccgcaccagatccacctgggagaactgcacgcaatcctgagaagacaggaagacttctacccgttcctgaaggacaacagagaaaagatcgaaaagatcctgacattcagaatcccgtactacgtcggaccgctggcaagaggaaacagcagattcgcatggatgacaagaaagagcgaagaaacaatcacaccgtggaacttcgaagaagtcgtcgacaagggagcaagcgcacagagcttcatcgaaagaatgacaaacttcgacaagaacctgccgaacgaaaaggtcctgccgaagcacagcctgctgtacgaatacttcacagtctacaacgaactgacaaaggtcaagtacgtcacagaaggaatgagaaagccggcattcctgagcggagaacagaagaaggcaatcgtcgacctgctgttcaagacaaacagaaaggtcacagtcaagcagctgaaggaagactacttcaagaagatcgaatgcttcgacagcgtcgaaatcagcggagtcgaagacagattcaacgcaagcctgggaacataccacgacctgctgaagatcatcaaggacaaggacttcctggacaacgaagaaaacgaagacatcctggaagacatcgtcctgacactgacactgttcgaagacagagaaatgatcgaagaaagactgaagacatacgcacacctgttcgacgacaaggtcatgaagcagctgaagagaagaagatacacaggatggggaagactgagcagaaagctgatcaacggaatcagagacaagcagagcggaaagacaatcctggacttcctgaagagcgacggattcgcaaacagaaacttcatgcagctgatccacgacgacagcctgacattcaaggaagacatccagaaggcacaggtcagcggacagggagacagcctgcacgaacacatcgcaaacctggcaggaagcccggcaatcaagaagggaatcctgcagacagtcaaggtcgtcgacgaactggtcaaggtcatgggaagacacaagccggaaaacatcgtcatcgaaatggcaagagaaaaccagacaacacagaagggacagaagaacagcagagaaagaatgaagagaatcgaagaaggaatcaaggaactgggaagccagatcctgaaggaacacccggtcgaaaacacacagctgcagaacgaaaagctgtacctgtactacctgcagaacggaagagacatgtacgtcgaccaggaactggacatcaacagactgagcgactacgacgtcgaccacatcgtcccgcagagcttcctgaaggacgacagcatcgacaacaaggtcctgacaagaagcgacaagaacagaggaaagagcgacaacgtcccgagcgaagaagtcgtcaagaagatgaagaactactggagacagctgctgaacgcaaagctgatcacacagagaaagttcgacaacctgacaaaggcagagagaggaggactgagcgaactggacaaggcaggattcatcaagagacagctggtcgaaacaagacagatcacaaagcacgtcgcacagatcctggacagcagaatgaacacaaagtacgacgaaaacgacaagctgatcagagaagtcaaggtcatcacactgaagagcaagctggtcagcgacttcagaaaggacttccagttctacaaggtcagagaaatcaacaactaccaccacgcacacgacgcatacctgaacgcagtcgtcggaacagcactgatcaagaagtacccgaagctggaaagcgaattcgtctacggagactacaaggtctacgacgtcagaaagatgatcgcaaagagcgaacaggaaatcggaaaggcaacagcaaagtacttcttctacagcaacatcatgaacttcttcaagacagaaatcacactggcaaacggagaaatcagaaagagaccgctgatcgaaacaaacggagaaacaggagaaatcgtctgggacaagggaagagacttcgcaacagtcagaaaggtcctgagcatgccgcaggtcaacatcgtcaagaagacagaagtccagacaggaggattcagcaaggaaagcatcctgccgaagagaaacagcgacaagctgatcgcaagaaagaaggactgggacccgaagaagtacggaggattcgacagcccgacagtcgcatacagcgtcctggtcgtcgcaaaggtcgaaaagggaaagagcaagaagctgaagagcgtcaaggaactgctgggaatcacaatcatggaaagaagcagcttcgaaaagaacccgatcgacttcctggaagcaaagggatacaaggaagtcaagaaggacctgatcatcaagctgccgaagtacagcctgttcgaactggaaaacggaagaaagagaatgctggcaagcgcaggagaactgcagaagggaaacgaactggcactgccgagcaagtacgtcaacttcctgtacctggcaagccactacgaaaagctgaagggaagcccggaagacaacgaacagaagcagctgttcgtcgaacagcacaagcactacctggacgaaatcatcgaacagatcagcgaattcagcaagagagtcatcctggcagacgcaaacctggacaaggtcctgagcgcatacaacaagcacagagacaagccgatcagagaacaggcagaaaacatcatccacctgttcacactgacaaacctgggagcaccggcagcattcaagtacttcgacacaacaatcgacagaaagagatacacaagcacaaaggaagtcctggacgcaacactgatccaccagagcatcacaggactgtacgaaacaagaatcgacctgagccagctgggaggagacggaggaggaagcccgaagaagaagagaaaggtctag

SEQ ID NO: 817 - DNA, 4140 bp, synthetic construct
  misc_feature 1..4140: note = Synthetic
  source 1..4140: mol_type = other DNA
atggacaagaagtacagcatcggcctcgacatcggcaccaacagcgtcggctgggccgtcatcaccgacgagtacaaggtccccagcaagaagttcaaggtcctcggcaacaccgaccgccacagcatcaagaagaacctcatcggcgccctcctcttcgacagcggcgagaccgccgaggccacccgcctcaagcgcaccgcccgccgccgctacacccgccgcaagaaccgcatctgctacctccaggagatcttcagcaacgagatggccaaggtcgacgacagcttcttccaccgcctcgaggagagcttcctcgtcgaggaggacaagaagcacgagcgccaccccatcttcggcaacatcgtcgacgaggtcgcctaccacgagaagtaccccaccatctaccacctccgcaagaagctcgtcgacagcaccgacaaggccgacctccgcctcatctacctcgccctcgcccacatgatcaagttccgcggccacttcctcatcgagggcgacctcaaccccgacaacagcgacgtcgacaagctcttcatccagctcgtccagacctacaaccagctcttcgaggagaaccccatcaacgccagcggcgtcgacgccaaggccatcctcagcgcccgcctcagcaagagccgccgcctcgagaacctcatcgcccagctccccggcgagaagaagaacggcctcttcggcaacctcatcgccctcagcctcggcctcacccccaacttcaagagcaacttcgacctcgccgaggacgccaagctccagctcagcaaggacacctacgacgacgacctcgacaacctcctcgcccagatcggcgaccagtacgccgacctcttcctcgccgccaagaacctcagcgacgccatcctcctcagcgacatcctccgcgtcaacaccgagatcaccaaggcccccctcagcgccagcatgatcaagcgctacgacgagcaccaccaggacctcaccctcctcaaggccctcgtccgccagcagctccccgagaagtacaaggagatcttcttcgaccagagcaagaacggctacgccggctacatcgacggcggcgccagccaggaggagttctacaagttcatcaagcccatcctcgagaagatggacggcaccgaggagctcctcgtcaagctcaaccgcgaggacctcctccgcaagcagcgcaccttcgacaacggcagcatcccccaccagatccacctcggcgagctccacgccatcctccgccgccaggaggacttctaccccttcctcaaggacaaccgcgagaagatcgagaagatcctcaccttccgcatcccctactacgtcggccccctcgcccgcggcaacagccgcttcgcctggatgacccgcaagagcgaggagaccatcaccccctggaacttcgaggaggtcgtcgacaagggcgccagcgcccagagcttcatcgagcgcatgaccaacttcgacaagaacctccccaacgagaaggtcctccccaagcacagcctcctctacgagtacttcaccgtctacaacgagctcaccaaggtcaagtacgtcaccgagggcatgcgcaagcccgccttcctcagcggcgagcagaagaaggccatcgtcgacctcctcttcaagaccaaccgcaaggtcaccgtcaagcagctcaaggaggactacttcaagaagatcgagtgcttcgacagcgtcgagatcagcggcgtcgaggaccgcttcaacgccagcctcggcacctaccacgacctcctcaagatcatcaaggacaaggacttcctcgacaacgaggagaacgaggacatcctcgaggacatcgtcctcaccctcaccctcttcgaggaccgcgagatgatcgaggagcgcctcaagacctacgcccacctcttcgacgacaaggtcatgaagcagctcaagcgccgccgctacaccggctggggccgcctcagccgcaagctcatcaacggcatccgcgacaagcagagcggcaagaccatcctcgacttcctcaagagcgacggcttcgccaaccgcaacttcatgcagctcatccacgacgacagcctcaccttcaaggaggacatccagaaggcccaggtcagcggccagggcgacagcctccacgagcacatcgccaacctcgccggcagccccgccatcaagaagggcatcctccagaccgtcaaggtcgtcgacgagctcgtcaaggtcatgggccgccacaagcccgagaacatcgtcatcgagatggcccgcgagaaccagaccacccagaagggccagaagaacagccgcgagcgcatgaagcgcatcgaggagggcatcaaggagctcggcagccagatcctcaaggagcaccccgtcgagaacacccagctccagaacgagaagctctacctctactacctccagaacggccgcgacatgtacgtcgaccaggagctcgacatcaaccgcctcagcgactacgacgtcgaccacatcgtcccccagagcttcctcaaggacgacagcatcgacaacaaggtcctcacccgcagcgacaagaaccgcggcaagagcgacaacgtccccagcgaggaggtcgtcaagaagatgaagaactactggcgccagctcctcaacgccaagctcatcacccagcgcaagttcgacaacctcaccaaggccgagcgcggcggcctcagcgagctcgacaaggccggcttcatcaagcgccagctcgtcgagacccgccagatcaccaagcacgtcgcccagatcctcgacagccgcatgaacaccaagtacgacgagaacgacaagctcatccgcgaggtcaaggtcatcaccctcaagagcaagctcgtcagcgacttccgcaaggacttccagttctacaaggtccgcgagatcaacaactaccaccacgcccacgacgcctacctcaacgccgtcgtcggcaccgccctcatcaagaagtaccccaagctcgagagcgagttcgtctacggcgactacaaggtctacgacgtccgcaagatgatcgccaagagcgagcaggagatcggcaaggccaccgccaagtacttcttctacagcaacatcatgaacttcttcaagaccgagatcaccctcgccaacggcgagatccgcaagcgccccctcatcgagaccaacggcgagaccggcgagatcgtctgggacaagggccgcgacttcgccaccgtccgcaaggtcctcagcatgccccaggtcaacatcgtcaagaagaccgaggtccagaccggcggcttcagcaaggagagcatcctccccaagcgcaacagcgacaagctcatcgcccgcaagaaggactgggaccccaagaagtacggcggcttcgacagccccaccgtcgcctacagcgtcctcgtcgtcgccaaggtcgagaagggcaagagcaagaagctcaagagcgtcaaggagctcctcggcatcaccatcatggagcgcagcagcttcgagaagaaccccatcgacttcctcgaggccaagggctacaaggaggtcaagaaggacctcatcatcaagctccccaagtacagcctcttcgagctcgagaacggccgcaagcgcatgctcgccagcgccggcgagctccagaagggcaacgagctcgccctccccagcaagtacgtcaacttcctctacctcgccagccactacgagaagctcaagggcagccccgaggacaacgagcagaagcagctcttcgtcgagcagcacaagcactacctcgacgagatcatcgagcagatcagcgagttcagcaagcgcgtcatcctcgccgacgccaacctcgacaaggtcctcagcgcctacaacaagcaccgcgacaagcccatccgcgagcaggccgagaacatcatccacctcttcaccctcaccaacctcggcgcccccgccgccttcaagtacttcgacaccaccatcgaccgcaagcgctacaccagcaccaaggaggtcctcgacgccaccctcatccaccagagcatcaccggcctctacgagacccgcatcgacctcagccagctcggcggcgacggcggcggcagccccaagaagaagcgcaaggtctag

SEQ ID NO: 818 - DNA, 4140 bp, synthetic construct
  misc_feature 1..4140: note = Synthetic
  source 1..4140: mol_type = other DNA
atggacaagaagtacagcatcggcctggacatcggcaccaacagcgtgggctgggccgtgatcaccgacgagtacaaggtgcccagcaagaagttcaaggtgctgggcaacaccgaccggcacagcatcaagaagaacctgatcggcgccctgctgttcgacagcggcgagaccgccgaggccacccggctgaagcggaccgcccggcggcggtacacccggcggaagaaccggatctgctacctgcaggagatcttcagcaacgagatggccaaggtggacgacagcttcttccaccggctggaggagagcttcctggtggaggaggacaagaagcacgagcggcaccccatcttcggcaacatcgtggacgaggtggcctaccacgagaagtaccccaccatctaccacctgcggaagaagctggtggacagcaccgacaaggccgacctgcggctgatctacctggccctggcccacatgatcaagttccggggccacttcctgatcgagggcgacctgaaccccgacaacagcgacgtggacaagctgttcatccagctggtgcagacctacaaccagctgttcgaggagaaccccatcaacgccagcggcgtggacgccaaggccatcctgagcgcccggctgagcaagagccggcggctggagaacctgatcgcccagctgcccggcgagaagaagaacggcctgttcggcaacctgatcgccctgagcctgggcctgacccccaacttcaagagcaacttcgacctggccgaggacgccaagctgcagctgagcaaggacacctacgacgacgacctggacaacctgctggcccagatcggcgaccagtacgccgacctgttcctggccgccaagaacctgagcgacgccatcctgctgagcgacatcctgcgggtgaacaccgagatcaccaaggcccccctgagcgccagcatgatcaagcggtacgacgagcaccaccaggacctgaccctgctgaaggccctggtgcggcagcagctgcccgagaagtacaaggagatcttcttcgaccagagcaagaacggctacgccggctacatcgacggcggcgccagccaggaggagttctacaagttcatcaagcccatcctggagaagatggacggcaccgaggagctgctggtgaagctgaaccgggaggacctgctgcggaagcagcggaccttcgacaacggcagcatcccccaccagatccacctgggcgagctgcacgccatcctgcggcggcaggaggacttctaccccttcctgaaggacaaccgggagaagatcgagaagatcctgaccttccggatcccctactacgtgggccccctggcccggggcaacagccggttcgcctggatgacccggaagagcgaggagaccatcaccccctggaacttcgaggaggtggtggacaagggcgccagcgcccagagcttcatcgagcggatgaccaacttcgacaagaacctgcccaacgagaaggtgctgcccaagcacagcctgctgtacgagtacttcaccgtgtacaacgagctgaccaaggtgaagtacgtgaccgagggcatgcggaagcccgccttcctgagcggcgagcagaagaaggccatcgtggacctgctgttcaagaccaaccggaaggtgaccgtgaagcagctgaaggaggactacttcaagaagatcgagtgcttcgacagcgtggagatcagcggcgtggaggaccggttcaacgccagcctgggcacctaccacgacctgctgaagatcatcaaggacaaggacttcctggacaacgaggagaacgaggacatcctggaggacatcgtgctgaccctgaccctgttcgaggaccgggagatgatcgaggagcggctgaagacctacgcccacctgttcgacgacaaggtgatgaagcagctgaagcggcggcggtacaccggctggggccggctgagccggaagctgatcaacggcatccgggacaagcagagcggcaagaccatcctggacttcctgaagagcgacggcttcgccaaccggaacttcatgcagctgatccacgacgacagcctgaccttcaaggaggacatccagaaggcccaggtgagcggccagggcgacagcctgcacgagcacatcgccaacctggccggcagccccgccatcaagaagggcatcctgcagaccgtgaaggtggtggacgagctggtgaaggtgatgggccggcacaagcccgagaacatcgtgatcgagatggcccgggagaaccagaccacccagaagggccagaagaacagccgggagcggatgaagcggatcgaggagggcatcaaggagctgggcagccagatcctgaaggagcaccccgtggagaacacccagctgcagaacgagaagctgtacctgtactacctgcagaacggccgggacatgtacgtggaccaggagctggacatcaaccggctgagcgactacgacgtggaccacatcgtgccccagagcttcctgaaggacgacagcatcgacaacaaggtgctgacccggagcgacaagaaccggggcaagagcgacaacgtgcccagcgaggaggtggtgaagaagatgaagaactactggcggcagctgctgaacgccaagctgatcacccagcggaagttcgacaacctgaccaaggccgagcggggcggcctgagcgagctggacaaggccggcttcatcaagcggcagctggtggagacccggcagatcaccaagcacgtggcccagatcctggacagccggatgaacaccaagtacgacgagaacgacaagctgatccgggaggtgaaggtgatcaccctgaagagcaagctggtgagcgacttccggaaggacttccagttctacaaggtgcgggagatcaacaactaccaccacgcccacgacgcctacctgaacgccgtggtgggcaccgccctgatcaagaagtaccccaagctggagagcgagttcgtgtacggcgactacaaggtgtacgacgtgcggaagatgatcgccaagagcgagcaggagatcggcaaggccaccgccaagtacttcttctacagcaacatcatgaacttcttcaagaccgagatcaccctggccaacggcgagatccggaagcggcccctgatcgagaccaacggcgagaccggcgagatcgtgtgggacaagggccgggacttcgccaccgtgcggaaggtgctgagcatgccccaggtgaacatcgtgaagaagaccgaggtgcagaccggcggcttcagcaaggagagcatcctgcccaagcggaacagcgacaagctgatcgcccggaagaaggactgggaccccaagaagtacggcggcttcgacagccccaccgtggcctacagcgtgctggtggtggccaaggtggagaagggcaagagcaagaagctgaagagcgtgaaggagctgctgggcatcaccatcatggagcggagcagcttcgagaagaaccccatcgacttcctggaggccaagggctacaaggaggtgaagaaggacctgatcatcaagctgcccaagtacagcctgttcgagctggagaacggccggaagcggatgctggccagcgccggcgagctgcagaagggcaacgagctggccctgcccagcaagtacgtgaacttcctgtacctggccagccactacgagaagctgaagggcagccccgaggacaacgagcagaagcagctgttcgtggagcagcacaagcactacctggacgagatcatcgagcagatcagcgagttcagcaagcgggtgatcctggccgacgccaacctggacaaggtgctgagcgcctacaacaagcaccgggacaagcccatccgggagcaggccgagaacatcatccacctgttcaccctgaccaacctgggcgcccccgccgccttcaagtacttcgacaccaccatcgaccggaagcggtacaccagcaccaaggaggtgctggacgccaccctgatccaccagagcatcaccggcctgtacgagacccggatcgacctgagccagctgggcggcgacggcggcggcagccccaagaagaagcggaaggtgtga

SEQ ID NO: 819 - DNA, 4140 bp, synthetic construct
  misc_feature 1..4140: note = Synthetic
  source 1..4140: mol_type = other DNA
atggacaagaagtacagcatcggcctggacatcggcacgaacagcgttggctgggctgtgatcacggacgagtacaaggttccctcaaagaagttcaaggtgctgggcaacacggaccggcacagcatcaagaagaatctcatcggtgcactgctgttcgacagcggtgagacggccgaagccacgcggctgaagcggacggcccgccggcggtacacgcggcggaagaaccggatctgctacctgcaggagatcttcagcaacgagatggccaaggtggacgacagcttcttccaccggctggaggagagcttcctggtggaggaggacaagaagcacgagcggcaccccatcttcggcaacatcgtggacgaagtcgcctaccacgagaagtaccccaccatctaccacctgcggaagaagctggtggactcgactgacaaggccgacctgcggctgatctacctggcactggcccacatgataaagttccggggccacttcctgatcgagggcgacctgaaccctgacaacagcgacgtggacaagctgttcatccagctggtgcagacctacaaccagctgttcgaggagaaccccatcaacgccagcggcgtggacgccaaggccatcctcagcgcccgcctcagcaagagccggcggctggagaatctcatcgcccagcttccaggtgagaagaagaatgggctgttcggcaatctcatcgcactcagcctgggcctgactcccaacttcaagagcaacttcgacctggccgaggacgccaagctgcagctcagcaaggacacctacgacgacgacctggacaatctcctggcccagatcggcgaccagtacgccgacctgttcctggctgccaagaatctcagcgacgccatcctgctcagcgacatcctgcgggtgaacacagagatcacgaaggcccccctcagcgccagcatgataaagcggtacgacgagcaccaccaggacctgacgctgctgaaggcactggtgcggcagcagcttccagagaagtacaaggagatcttcttcgaccagagcaagaatgggtacgccgggtacatcgacggtggtgccagccaggaggagttctacaagttcatcaagcccatcctggagaagatggacggcacagaggagctgctggtgaagctgaacagggaggacctgctgcggaagcagcggacgttcgacaatgggagcatcccccaccagatccacctgggtgagctgcacgccatcctgcggcggcaggaggacttctaccccttcctgaaggacaacagggagaagatcgagaagatcctgacgttccggatcccctactacgttggccccctggcccgcggcaacagccggttcgcctggatgacgcggaagagcgaggagacgatcactccctggaacttcgaggaagtcgtggacaagggtgccagcgcccagagcttcatcgagcggatgacgaacttcgacaagaatcttccaaacgagaaggtgcttccaaagcacagcctgctgtacgagtacttcacggtgtacaacgagctgacgaaggtgaagtacgtgacagagggcatgcggaagcccgccttcctcagcggtgagcagaagaaggccatcgtggacctgctgttcaagacgaaccggaaggtgacggtgaagcagctgaaggaggactacttcaagaagatcgagtgcttcgacagcgtggagatcagcggcgtggaggaccggttcaacgccagcctgggcacctaccacgacctgctgaagatcatcaaggacaaggacttcctggacaacgaggagaacgaggacatcctggaggacatcgtgctgacgctgacgctgttcgaggacagggagatgatagaggagcggctgaagacctacgcccacctgttcgacgacaaggtgatgaagcagctgaagcggcggcggtacacgggctggggccggctcagccggaagctgatcaatgggatccgagacaagcagagcggcaagacgatcctggacttcctgaagagcgacggcttcgccaaccggaacttcatgcagctgatccacgacgacagcctgacgttcaaggaggacatccagaaggcccaggtcagcggccagggcgacagcctgcacgagcacatcgccaatctcgccgggagccccgccatcaagaaggggatcctgcagacggtgaaggtggtggacgagctggtgaaggtgatgggccggcacaagccagagaacatcgtgatcgagatggccagggagaaccagacgactcaaaaggggcagaagaacagcagggagcggatgaagcggatcgaggagggcatcaaggagctgggcagccagatcctgaaggagcaccccgtggagaacactcaactgcagaacgagaagctgtacctgtactacctgcagaatgggcgagacatgtacgtggaccaggagctggacatcaaccggctcagcgactacgacgtggaccacatcgttccccagagcttcctgaaggacgacagcatcgacaacaaggtgctgacgcggagcgacaagaaccggggcaagagcgacaacgttccctcagaggaagtcgtgaagaagatgaagaactactggcggcagctgctgaacgccaagctgatcactcaacggaagttcgacaatctcacgaaggccgagcggggtggcctcagcgagctggacaaggccgggttcatcaagcggcagctggtggagacgcggcagatcacgaagcacgtggcccagatcctggacagccggatgaacacgaagtacgacgagaacgacaagctgatcagggaagtcaaggtgatcacgctgaagagcaagctggtcagcgacttccggaaggacttccagttctacaaggtgagggagatcaacaactaccaccacgcccacgacgcctacctgaacgctgtggttggcacggcactgatcaagaagtaccccaagctggagagcgagttcgtgtacggcgactacaaggtgtacgacgtgcggaagatgatagccaagagcgagcaggagatcggcaaggccacggccaagtacttcttctacagcaacatcatgaacttcttcaagacagagatcacgctggccaatggtgagatccggaagcggcccctgatcgagacgaatggtgagacgggtgagatcgtgtgggacaaggggcgagacttcgccacggtgcggaaggtgctcagcatgccccaggtgaacatcgtgaagaagacagaagtccagacgggtggcttcagcaaggagagcatccttccaaagcggaacagcgacaagctgatcgcccgcaagaaggactgggaccccaagaagtacggtggcttcgacagccccaccgtggcctacagcgtgctggtggtggccaaggtggagaaggggaagagcaagaagctgaagagcgtgaaggagctgctgggcatcacgatcatggagcggagcagcttcgagaagaaccccatcgacttcctggaagccaaggggtacaaggaagtcaagaaggacctgatcatcaagcttccaaagtacagcctgttcgagctggagaatgggcggaagcggatgctggccagcgccggtgagctgcagaaggggaacgagctggcacttccctcaaagtacgtgaacttcctgtacctggccagccactacgagaagctgaaggggagcccagaggacaacgagcagaagcagctgttcgtggagcagcacaagcactacctggacgagatcatcgagcagatcagcgagttcagcaagcgggtgatcctggccgacgccaatctcgacaaggtgctcagcgcctacaacaagcaccgagacaagcccatcagggagcaggccgagaacatcatccacctgttcacgctgacgaatctcggtgcccccgctgccttcaagtacttcgacacgacgatcgaccggaagcggtacacgtcgactaaggaagtcctggacgccacgctgatccaccagagcatcacgggcctgtacgagacgcggatcgacctcagccagctgggtggcgacggtggtggcagccccaagaagaagcggaaggtgtag

SEQ ID NO: 820 - DNA, 4440 bp, synthetic construct
  misc_feature 1..4440: note = Synthetic
  source 1..4440: mol_type = other DNA
atggacaagaagtacagcatcggactggacatcggaacaaacagcgtcggatgggcagtcatcacagacgaatacaaggtcccgagcaagaagttcaaggtcctgggaaacacagacagacacagcatcaagaagaacctgatcggagcactgctgttcgacagcggagaaacagcagaagcaacaagactgaagagaacagcaagaagaagatacacaagaagaaagaacagaatctgctacctgcaggaaatcttcagcaacgaaatggcaaaggtcgacgacagcttcttccacagactggaagaaagcttcctggtcgaagaagacaagaagcacgaaagacacccgatcttcggaaacatcgtcgacgaagtcgcataccacgaaaagtacccgacaatctaccacctgagaaagaagctggtcgacagcacagacaaggcagacctgagactgatctacctggcactggcacacatgatcaagttcagaggacacttcctgatcgaaggagacctgaacccggacaacagcgacgtcgacaagctgttcatccagctggtccagacatacaaccagctgttcgaagaaaacccgatcaacgcaagcggagtcgacgcaaaggcaatcctgagcgcaagactgagcaagagcagaagactggaaaacctgatcgcacagctgccgggagaaaagaagaacggactgttcggaaacctgatcgcactgagcctgggactgacaccgaacttcaagagcaacttcgacctggcagaagacgcaaagctgcagctgagcaaggacacatacgacgacgacctggacaacctgctggcacagatcggagaccagtacgcagacctgttcctggcagcaaagaacctgagcgacgcaatcctgctgagcgacatcctgagagtcaacacagaaatcacaaaggcaccgctgagcgcaagcatgatcaagagatacgacgaacaccaccaggacctgacactgctgaaggcactggtcagacagcagctgccggaaaagtacaaggaaatcttcttcgaccagagcaagaacggatacgcaggatacatcgacggaggagcaagccaggaagaattctacaagttcatcaagccgatcctggaaaagatggacggaacagaagaactgctggtcaagctgaacagagaagacctgctgagaaagcagagaacattcgacaacggaagcatcccgcaccagatccacctgggagaactgcacgcaatcctgagaagacaggaagacttctacccgttcctgaaggacaacagagaaaagatcgaaaagatcctgacattcagaatcccgtactacgtcggaccgctggcaagaggaaacagcagattcgcatggatgacaagaaagagcgaagaaacaatcacaccgtggaacttcgaagaagtcgtcgacaagggagcaagcgcacagagcttcatcgaaagaatgacaaacttcgacaagaacctgccgaacgaaaaggtcctgccgaagcacagcctgctgtacgaatacttcacagtctacaacgaactgacaaaggtcaagtacgtcacagaaggaatgagaaagccggcattcctgagcggagaacagaagaaggcaatcgtcgacctgctgttcaagacaaacagaaaggtcacagtcaagcagctgaaggaagactacttcaagaagatcgaatgcttcgacagcgtcgaaatcagcggagtcgaagacagattcaacgcaagcctgggaacataccacgacctgctgaagatcatcaaggacaaggacttcctggacaacgaagaaaacgaagacatcctggaagacatcgtcctgacactgacactgttcgaagacagagaaatgatcgaagaaagactgaagacatacgcacacctgttcgacgacaaggtcatgaagcagctgaagagaagaagatacacaggatggggaagactgagcagaaagctgatcaacggaatcagagacaagcagagcggaaagacaatcctggacttcctgaagagcgacggattcgcaaacagaaacttcatgcagctgatccacgacgacagcctgacattcaaggaagacatccagaaggcacaggtcagcggacagggagacagcctgcacgaacacatcgcaaacctggcaggaagcccggcaatcaagaagggaatcctgcagacagtcaaggtcgtcgacgaactggtcaaggtcatgggaagacacaagccggaaaacatcgtcatcgaaatggcaagagaaaaccagacaacacagaagggacagaagaacagcagagaaagaatgaagagaatcgaagaaggaatcaaggaactgggaagccagatcctgaaggaacacccggtcgaaaacacacagctgcagaacgaaaagctgtacctgtactacctgcagaacggaagagacatgtacgtcgaccaggaactggacatcaacagactgagcgactacgacgtcgaccacatcgtcccgcagagcttcctgaaggacgacagcatcgacaacaaggtcctgacaagaagcgacaagaacagaggaaagagcgacaacgtcccgagcgaagaagtcgtcaagaagatgaagaactactggagacagctgctgaacgcaaagctgatcacacagagaaagttcgacaacctgacaaaggcagagagaggaggactgagcgaactggacaaggcaggattcatcaagagacagctggtcgaaacaagacagatcacaaagcacgtcgcacagatcctggacagcagaatgaacacaaagtacgacgaaaacgacaagctgatcagagaagtcaaggtcatcacactgaagagcaagctggtcagcgacttcagaaaggacttccagttctacaaggtcagagaaatcaacaactaccaccacgcacacgacgcatacctgaacgcagtcgtcggaacagcactgatcaagaagtacccgaagctggaaagcgaattcgtctacggagactacaaggtctacgacgtcagaaagatgatcgcaaagagcgaacaggaaatcggaaaggcaacagcaaagtacttcttctacagcaacatcatgaacttcttcaagacagaaatcacactggcaaacggagaaatcagaaagagaccgctgatcgaaacaaacggagaaacaggagaaatcgtctgggacaagggaagagacttcgcaacagtcagaaaggtcctgagcatgccgcaggtcaacatcgtcaagaagacagaagtccagacaggaggattcagcaaggaaagcatcctgccgaagagaaacagcgacaagctgatcgcaagaaagaaggactgggacccgaagaagtacggaggattcgacagcccgacagtcgcatacagcgtcctggtcgtcgcaaaggtcgaaaagggaaagagcaagaagctgaagagcgtcaaggaactgctgggaatcacaatcatggaaagaagcagcttcgaaaagaacccgatcgacttcctggaagcaaagggatacaaggaagtcaagaaggacctgatcatcaagctgccgaagtacagcctgttcgaactggaaaacggaagaaagagaatgctggcaagcgcaggagaactgcagaagggaaacgaactggcactgccgagcaagtacgtcaacttcctgtacctggcaagccactacgaaaagctgaagggaagcccggaagacaacgaacagaagcagctgttcgtcgaacagcacaagcactacctggacgaaatcatcgaacagatcagcgaattcagcaagagagtcatcctggcagacgcaaacctggacaaggtcctgagcgcatacaacaagcacagagacaagccgatcagagaacaggcagaaaacatcatccacctgttcacactgacaaacctgggagcaccggcagcattcaagtacttcgacacaacaatcgacagaaagagatacacaagcacaaaggaagtcctggacgcaacactgatccaccagagcatcacaggactgtacgaaacaagaatcgacctgagccagctgggaggagacggaggaggaagcccgaagaagaagagaaaggtctagctagccatcacatttaaaagcatctcagcctaccatgagaataagagaaagaaaatgaagatcaatagcttattcatctctttttctttttcgttggtgtaaagccaacaccctgtctaaaaaacataaatttctttaatcattttgcctcttttctctgtgcttcaattaataaaaaatggaaagaacctcgagaaaaaaaaaaaaaaaaaaaaaaaaaaaaaaaaaaaaaaaaaaaaaaaaaaaaaaaaaaaaaaaaaaaaaaaaaaaaaaaaaaaaaaaaaaaaaaaaaaaatctag

SEQ ID NO: 821 - DNA, 5342 bp, synthetic construct
  misc_feature 1..5342: note = Synthetic
  source 1..5342: mol_type = other DNA
gggaagctcagaataaacgctcaactttggccggatctgccaccatggaggcctcccccgcctccggcccccggcacctgatggacccccacatcttcacctccaacttcaacaacggcatcggccggcacaagacctacctgtgctacgaggtggagcggctggacaacggcacctccgtgaagatggaccagcaccggggcttcctgcacaaccaggccaagaacctgctgtgcggcttctacggccggcacgccgagctgcggttcctggacctggtgccctccctgcagctggaccccgcccagatctaccgggtgacctggttcatctcctggtccccctgcttctcctggggctgcgccggcgaggtgcgggccttcctgcaggagaacacccacgtgcggctgcggatcttcgccgcccggatctacgactacgaccccctgtacaaggaggccctgcagatgctgcgggacgccggcgcccaggtgtccatcatgacctacgacgagttcaagcactgctgggacaccttcgtggaccaccagggctgccccttccagccctgggacggcctggacgagcactcccaggccctgtccggccggctgcgggccatcctgcagaaccagggcaactccggctccgagacccccggcacctccgagtccgccacccccgagtccgacaagaagtactccatcggcctggccatcggcaccaactccgtgggctgggccgtgatcaccgacgagtacaaggtgccctccaagaagttcaaggtgctgggcaacaccgaccggcactccatcaagaagaacctgatcggcgccctgctgttcgactccggcgagaccgccgaggccacccggctgaagcggaccgcccggcggcggtacacccggcggaagaaccggatctgctacctgcaggagatcttctccaacgagatggccaaggtggacgactccttcttccaccggctggaggagtccttcctggtggaggaggacaagaagcacgagcggcaccccatcttcggcaacatcgtggacgaggtggcctaccacgagaagtaccccaccatctaccacctgcggaagaagctggtggactccaccgacaaggccgacctgcggctgatctacctggccctggcccacatgatcaagttccggggccacttcctgatcgagggcgacctgaaccccgacaactccgacgtggacaagctgttcatccagctggtgcagacctacaaccagctgttcgaggagaaccccatcaacgcctccggcgtggacgccaaggccatcctgtccgcccggctgtccaagtcccggcggctggagaacctgatcgcccagctgcccggcgagaagaagaacggcctgttcggcaacctgatcgccctgtccctgggcctgacccccaacttcaagtccaacttcgacctggccgaggacgccaagctgcagctgtccaaggacacctacgacgacgacctggacaacctgctggcccagatcggcgaccagtacgccgacctgttcctggccgccaagaacctgtccgacgccatcctgctgtccgacatcctgcgggtgaacaccgagatcaccaaggcccccctgtccgcctccatgatcaagcggtacgacgagcaccaccaggacctgaccctgctgaaggccctggtgcggcagcagctgcccgagaagtacaaggagatcttcttcgaccagtccaagaacggctacgccggctacatcgacggcggcgcctcccaggaggagttctacaagttcatcaagcccatcctggagaagatggacggcaccgaggagctgctggtgaagctgaaccgggaggacctgctgcggaagcagcggaccttcgacaacggctccatcccccaccagatccacctgggcgagctgcacgccatcctgcggcggcaggaggacttctaccccttcctgaaggacaaccgggagaagatcgagaagatcctgaccttccggatcccctactacgtgggccccctggcccggggcaactcccggttcgcctggatgacccggaagtccgaggagaccatcaccccctggaacttcgaggaggtggtggacaagggcgcctccgcccagtccttcatcgagcggatgaccaacttcgacaagaacctgcccaacgagaaggtgctgcccaagcactccctgctgtacgagtacttcaccgtgtacaacgagctgaccaaggtgaagtacgtgaccgagggcatgcggaagcccgccttcctgtccggcgagcagaagaaggccatcgtggacctgctgttcaagaccaaccggaaggtgaccgtgaagcagctgaaggaggactacttcaagaagatcgagtgcttcgactccgtggagatctccggcgtggaggaccggttcaacgcctccctgggcacctaccacgacctgctgaagatcatcaaggacaaggacttcctggacaacgaggagaacgaggacatcctggaggacatcgtgctgaccctgaccctgttcgaggaccgggagatgatcgaggagcggctgaagacctacgcccacctgttcgacgacaaggtgatgaagcagctgaagcggcggcggtacaccggctggggccggctgtcccggaagctgatcaacggcatccgggacaagcagtccggcaagaccatcctggacttcctgaagtccgacggcttcgccaaccggaacttcatgcagctgatccacgacgactccctgaccttcaaggaggacatccagaaggcccaggtgtccggccagggcgactccctgcacgagcacatcgccaacctggccggctcccccgccatcaagaagggcatcctgcagaccgtgaaggtggtggacgagctggtgaaggtgatgggccggcacaagcccgagaacatcgtgatcgagatggcccgggagaaccagaccacccagaagggccagaagaactcccgggagcggatgaagcggatcgaggagggcatcaaggagctgggctcccagatcctgaaggagcaccccgtggagaacacccagctgcagaacgagaagctgtacctgtactacctgcagaacggccgggacatgtacgtggaccaggagctggacatcaaccggctgtccgactacgacgtggaccacatcgtgccccagtccttcctgaaggacgactccatcgacaacaaggtgctgacccggtccgacaagaaccggggcaagtccgacaacgtgccctccgaggaggtggtgaagaagatgaagaactactggcggcagctgctgaacgccaagctgatcacccagcggaagttcgacaacctgaccaaggccgagcggggcggcctgtccgagctggacaaggccggcttcatcaagcggcagctggtggagacccggcagatcaccaagcacgtggcccagatcctggactcccggatgaacaccaagtacgacgagaacgacaagctgatccgggaggtgaaggtgatcaccctgaagtccaagctggtgtccgacttccggaaggacttccagttctacaaggtgcgggagatcaacaactaccaccacgcccacgacgcctacctgaacgccgtggtgggcaccgccctgatcaagaagtaccccaagctggagtccgagttcgtgtacggcgactacaaggtgtacgacgtgcggaagatgatcgccaagtccgagcaggagatcggcaaggccaccgccaagtacttcttctactccaacatcatgaacttcttcaagaccgagatcaccctggccaacggcgagatccggaagcggcccctgatcgagaccaacggcgagaccggcgagatcgtgtgggacaagggccgggacttcgccaccgtgcggaaggtgctgtccatgccccaggtgaacatcgtgaagaagaccgaggtgcagaccggcggcttctccaaggagtccatcctgcccaagcggaactccgacaagctgatcgcccggaagaaggactgggaccccaagaagtacggcggcttcgactcccccaccgtggcctactccgtgctggtggtggccaaggtggagaagggcaagtccaagaagctgaagtccgtgaaggagctgctgggcatcaccatcatggagcggtcctccttcgagaagaaccccatcgacttcctggaggccaagggctacaaggaggtgaagaaggacctgatcatcaagctgcccaagtactccctgttcgagctggagaacggccggaagcggatgctggcctccgccggcgagctgcagaagggcaacgagctggccctgccctccaagtacgtgaacttcctgtacctggcctcccactacgagaagctgaagggctcccccgaggacaacgagcagaagcagctgttcgtggagcagcacaagcactacctggacgagatcatcgagcagatctccgagttctccaagcgggtgatcctggccgacgccaacctggacaaggtgctgtccgcctacaacaagcaccgggacaagcccatccgggagcaggccgagaacatcatccacctgttcaccctgaccaacctgggcgcccccgccgccttcaagtacttcgacaccaccatcgaccggaagcggtacacctccaccaaggaggtgctggacgccaccctgatccaccagtccatcaccggcctgtacgagacccggatcgacctgtcccagctgggcggcgacggcggcggctcccccaagaagaagcggaaggtgtgactagcaccagcctcaagaacacccgaatggagtctctaagctacataataccaacttacactttacaaaatgttgtcccccaaaatgtagccattcgtatctgctcctaataaaaagaaagtttcttcacattctctcgagaaaaaaaaaaaatggaaaaaaaaaaaacggaaaaaaaaaaaaggtaaaaaaaaaaaatataaaaaaaaaaaacataaaaaaaaaaaacgaaaaaaaaaaaacgtaaaaaaaaaaaactcaaaaaaaaaaaagataaaaaaaaaaaacctaaaaaaaaaaaatgtaaaaaaaaaaaagggaaaaaaaaaaaacgcaaaaaaaaaaaacacaaaaaaaaaaaatgcaaaaaaaaaaaatcgaaaaaaaaaaaatctaaaaaaaaaaaacgaaaaaaaaaaaacccaaaaaaaaaaaagacaaaaaaaaaaaatagaaaaaaaaaaaagttaaaaaaaaaaaactgaaaaaaaaaaaatttaaaaaaaaaaaatctag

SEQ ID NO: 822 - DNA, 5399 bp, synthetic construct
  misc_feature 1..5399: note = Synthetic
  source 1..5399: mol_type = other DNA
gggaagctcagaataaacgctcaactttggccggatctgccaccatggaggcctcccccgcctccggcccccggcacctgatggacccccacatcttcacctccaacttcaacaacggcatcggccggcacaagacctacctgtgctacgaggtggagcggctggacaacggcacctccgtgaagatggaccagcaccggggcttcctgcacaaccaggccaagaacctgctgtgcggcttctacggccggcacgccgagctgcggttcctggacctggtgccctccctgcagctggaccccgcccagatctaccgggtgacctggttcatctcctggtccccctgcttctcctggggctgcgccggcgaggtgcgggccttcctgcaggagaacacccacgtgcggctgcggatcttcgccgcccggatctacgactacgaccccctgtacaaggaggccctgcagatgctgcgggacgccggcgcccaggtgtccatcatgacctacgacgagttcaagcactgctgggacaccttcgtggaccaccagggctgccccttccagccctgggacggcctggacgagcactcccaggccctgtccggccggctgcgggccatcctgcagaaccagggcaactccggctccgagacccccggcacctccgagtccgccacccccgagtccgacaagaagtactccatcggcctggccatcggcaccaactccgtgggctgggccgtgatcaccgacgagtacaaggtgccctccaagaagttcaaggtgctgggcaacaccgaccggcactccatcaagaagaacctgatcggcgccctgctgttcgactccggcgagaccgccgaggccacccggctgaagcggaccgcccggcggcggtacacccggcggaagaaccggatctgctacctgcaggagatcttctccaacgagatggccaaggtggacgactccttcttccaccggctggaggagtccttcctggtggaggaggacaagaagcacgagcggcaccccatcttcggcaacatcgtggacgaggtggcctaccacgagaagtaccccaccatctaccacctgcggaagaagctggtggactccaccgacaaggccgacctgcggctgatctacctggccctggcccacatgatcaagttccggggccacttcctgatcgagggcgacctgaaccccgacaactccgacgtggacaagctgttcatccagctggtgcagacctacaaccagctgttcgaggagaaccccatcaacgcctccggcgtggacgccaaggccatcctgtccgcccggctgtccaagtcccggcggctggagaacctgatcgcccagctgcccggcgagaagaagaacggcctgttcggcaacctgatcgccctgtccctgggcctgacccccaacttcaagtccaacttcgacctggccgaggacgccaagctgcagctgtccaaggacacctacgacgacgacctggacaacctgctggcccagatcggcgaccagtacgccgacctgttcctggccgccaagaacctgtccgacgccatcctgctgtccgacatcctgcgggtgaacaccgagatcaccaaggcccccctgtccgcctccatgatcaagcggtacgacgagcaccaccaggacctgaccctgctgaaggccctggtgcggcagcagctgcccgagaagtacaaggagatcttcttcgaccagtccaagaacggctacgccggctacatcgacggcggcgcctcccaggaggagttctacaagttcatcaagcccatcctggagaagatggacggcaccgaggagctgctggtgaagctgaaccgggaggacctgctgcggaagcagcggaccttcgacaacggctccatcccccaccagatccacctgggcgagctgcacgccatcctgcggcggcaggaggacttctaccccttcctgaaggacaaccgggagaagatcgagaagatcctgaccttccggatcccctactacgtgggccccctggcccggggcaactcccggttcgcctggatgacccggaagtccgaggagaccatcaccccctggaacttcgaggaggtggtggacaagggcgcctccgcccagtccttcatcgagcggatgaccaacttcgacaagaacctgcccaacgagaaggtgctgcccaagcactccctgctgtacgagtacttcaccgtgtacaacgagctgaccaaggtgaagtacgtgaccgagggcatgcggaagcccgccttcctgtccggcgagcagaagaaggccatcgtggacctgctgttcaagaccaaccggaaggtgaccgtgaagcagctgaaggaggactacttcaagaagatcgagtgcttcgactccgtggagatctccggcgtggaggaccggttcaacgcctccctgggcacctaccacgacctgctgaagatcatcaaggacaaggacttcctggacaacgaggagaacgaggacatcctggaggacatcgtgctgaccctgaccctgttcgaggaccgggagatgatcgaggagcggctgaagacctacgcccacctgttcgacgacaaggtgatgaagcagctgaagcggcggcggtacaccggctggggccggctgtcccggaagctgatcaacggcatccgggacaagcagtccggcaagaccatcctggacttcctgaagtccgacggcttcgccaaccggaacttcatgcagctgatccacgacgactccctgaccttcaaggaggacatccagaaggcccaggtgtccggccagggcgactccctgcacgagcacatcgccaacctggccggctcccccgccatcaagaagggcatcctgcagaccgtgaaggtggtggacgagctggtgaaggtgatgggccggcacaagcccgagaacatcgtgatcgagatggcccgggagaaccagaccacccagaagggccagaagaactcccgggagcggatgaagcggatcgaggagggcatcaaggagctgggctcccagatcctgaaggagcaccccgtggagaacacccagctgcagaacgagaagctgtacctgtactacctgcagaacggccgggacatgtacgtggaccaggagctggacatcaaccggctgtccgactacgacgtggaccacatcgtgccccagtccttcctgaaggacgactccatcgacaacaaggtgctgacccggtccgacaagaaccggggcaagtccgacaacgtgccctccgaggaggtggtgaagaagatgaagaactactggcggcagctgctgaacgccaagctgatcacccagcggaagttcgacaacctgaccaaggccgagcggggcggcctgtccgagctggacaaggccggcttcatcaagcggcagctggtggagacccggcagatcaccaagcacgtggcccagatcctggactcccggatgaacaccaagtacgacgagaacgacaagctgatccgggaggtgaaggtgatcaccctgaagtccaagctggtgtccgacttccggaaggacttccagttctacaaggtgcgggagatcaacaactaccaccacgcccacgacgcctacctgaacgccgtggtgggcaccgccctgatcaagaagtaccccaagctggagtccgagttcgtgtacggcgactacaaggtgtacgacgtgcggaagatgatcgccaagtccgagcaggagatcggcaaggccaccgccaagtacttcttctactccaacatcatgaacttcttcaagaccgagatcaccctggccaacggcgagatccggaagcggcccctgatcgagaccaacggcgagaccggcgagatcgtgtgggacaagggccgggacttcgccaccgtgcggaaggtgctgtccatgccccaggtgaacatcgtgaagaagaccgaggtgcagaccggcggcttctccaaggagtccatcctgcccaagcggaactccgacaagctgatcgcccggaagaaggactgggaccccaagaagtacggcggcttcgactcccccaccgtggcctactccgtgctggtggtggccaaggtggagaagggcaagtccaagaagctgaagtccgtgaaggagctgctgggcatcaccatcatggagcggtcctccttcgagaagaaccccatcgacttcctggaggccaagggctacaaggaggtgaagaaggacctgatcatcaagctgcccaagtactccctgttcgagctggagaacggccggaagcggatgctggcctccgccggcgagctgcagaagggcaacgagctggccctgccctccaagtacgtgaacttcctgtacctggcctcccactacgagaagctgaagggctcccccgaggacaacgagcagaagcagctgttcgtggagcagcacaagcactacctggacgagatcatcgagcagatctccgagttctccaagcgggtgatcctggccgacgccaacctggacaaggtgctgtccgcctacaacaagcaccgggacaagcccatccgggagcaggccgagaacatcatccacctgttcaccctgaccaacctgggcgcccccgccgccttcaagtacttcgacaccaccatcgaccggaagcggtacacctccaccaaggaggtgctggacgccaccctgatccaccagtccatcaccggcctgtacgagacccggatcgacctgtcccagctgggcggcgacggcggcggctcccccaagaagaagcggaaggtgtccgagtccgccacccccgagtccgtgtccggctggcggctgttcaagaagatctcctgactagcaccagcctcaagaacacccgaatggagtctctaagctacataataccaacttacactttacaaaatgttgtcccccaaaatgtagccattcgtatctgctcctaataaaaagaaagtttcttcacattctctcgagaaaaaaaaaaaatggaaaaaaaaaaaacggaaaaaaaaaaaaggtaaaaaaaaaaaatataaaaaaaaaaaacataaaaaaaaaaaacgaaaaaaaaaaaacgtaaaaaaaaaaaactcaaaaaaaaaaaagataaaaaaaaaaaacctaaaaaaaaaaaatgtaaaaaaaaaaaagggaaaaaaaaaaaacgcaaaaaaaaaaaacacaaaaaaaaaaaatgcaaaaaaaaaaaatcgaaaaaaaaaaaatctaaaaaaaaaaaacgaaaaaaaaaaaacccaaaaaaaaaaaagacaaaaaaaaaaaatagaaaaaaaaaaaagttaaaaaaaaaaaactgaaaaaaaaaaaatttaaaaaaaaaaaatctag

SEQ ID NO: 823 - DNA, 324 bp, synthetic construct
  misc_feature 1..324: note = Synthetic
  source 1..324: mol_type = other DNA
atgaccaacctgtccgacatcatcgagaaggagaccggcaagcagctggtgatccaggagtccatcctgatgctgcccgaggaggtggaggaggtgatcggcaacaagcccgagtccgacatcctggtgcacaccgcctacgacgagtccaccgacgagaacgtgatgctgctgacctccgacgcccccgagtacaagccctgggccctggtgatccaggactccaacggcgagaacaagatcaagatgctgtccggcggctccaagcggaccgccgacggctccgagttcgagtcccccaagaagaagcggaaggtggagtga

SEQ ID NO: 824 - DNA, 291 bp, synthetic construct
  misc_feature 1..291: note = Synthetic
  source 1..291: mol_type = other DNA
atgggaccgaagaagaagagaaaggtcggaggaggaagcacaaacctgtcggacatcatcgaaaaggaaacaggaaagcagctggtcatccaggaatcgatcctgatgctgccggaagaagtcgaagaagtcatcggaaacaagccggaatcggacatcctggtccacacagcatacgacgaatcgacagacgaaaacgtcatgctgctgacatcggacgcaccggaatacaagccgtgggcactggtcatccaggactcgaacggagaaaacaagatcaagatgctgtga

SEQ ID NO: 825 - DNA, 381 bp, synthetic construct
  misc_feature 1..381: note = Synthetic
  source 1..381: mol_type = other DNA
atgaccaacctgtccgacatcatcgagaaggagaccggcaagcagctggtgatccaggagtccatcctgatgctgcccgaggaggtggaggaggtgatcggcaacaagcccgagtccgacatcctggtgcacaccgcctacgacgagtccaccgacgagaacgtgatgctgctgacctccgacgcccccgagtacaagccctgggccctggtgatccaggactccaacggcgagaacaagatcaagatgctgtccggcggctccaagcggaccgccgacggctccgagttcgagtcccccaagaagaagcggaaggtggagtccgagtccgccacccccgagtccgtgtccggctggcggctgttcaagaagatctcctga

SEQ ID NO: 826 - DNA, 327 bp, synthetic construct
  misc_feature 1..327: note = Synthetic
  source 1..327: mol_type = other DNA
atgaccaacctgtccgacatcatcgagaaggagaccggcaagcagctggtgatccaggagtccatcctgatgctgcccgaggaggtggaggaggtgatcggcaacaagcccgagtccgacatcctggtgcacaccgcctacgacgagtccaccgacgagaacgtgatgctgctgacctccgacgcccccgagtacaagccctgggccctggtgatccaggactccaacggcgagaacaagatcaagatgctgtccggcggctccaagcggaccgccgacggctccgagttcgagtcccccaagaagaagcggaaggtggagtgatag

SEQ ID NO: 827 - DNA, 4140 bp, synthetic construct
  misc_feature 1..4140: note = Synthetic
  source 1..4140: mol_type = other DNA
atggacaagaagtactccatcggcctggccatcggcaccaactccgtgggctgggccgtgatcaccgacgagtacaaggtgccctccaagaagttcaaggtgctgggcaacaccgaccggcactccatcaagaagaacctgatcggcgccctgctgttcgactccggcgagaccgccgaggccacccggctgaagcggaccgcccggcggcggtacacccggcggaagaaccggatctgctacctgcaggagatcttctccaacgagatggccaaggtggacgactccttcttccaccggctggaggagtccttcctggtggaggaggacaagaagcacgagcggcaccccatcttcggcaacatcgtggacgaggtggcctaccacgagaagtaccccaccatctaccacctgcggaagaagctggtggactccaccgacaaggccgacctgcggctgatctacctggccctggcccacatgatcaagttccggggccacttcctgatcgagggcgacctgaaccccgacaactccgacgtggacaagctgttcatccagctggtgcagacctacaaccagctgttcgaggagaaccccatcaacgcctccggcgtggacgccaaggccatcctgtccgcccggctgtccaagtcccggcggctggagaacctgatcgcccagctgcccggcgagaagaagaacggcctgttcggcaacctgatcgccctgtccctgggcctgacccccaacttcaagtccaacttcgacctggccgaggacgccaagctgcagctgtccaaggacacctacgacgacgacctggacaacctgctggcccagatcggcgaccagtacgccgacctgttcctggccgccaagaacctgtccgacgccatcctgctgtccgacatcctgcgggtgaacaccgagatcaccaaggcccccctgtccgcctccatgatcaagcggtacgacgagcaccaccaggacctgaccctgctgaaggccctggtgcggcagcagctgcccgagaagtacaaggagatcttcttcgaccagtccaagaacggctacgccggctacatcgacggcggcgcctcccaggaggagttctacaagttcatcaagcccatcctggagaagatggacggcaccgaggagctgctggtgaagctgaaccgggaggacctgctgcggaagcagcggaccttcgacaacggctccatcccccaccagatccacctgggcgagctgcacgccatcctgcggcggcaggaggacttctaccccttcctgaaggacaaccgggagaagatcgagaagatcctgaccttccggatcccctactacgtgggccccctggcccggggcaactcccggttcgcctggatgacccggaagtccgaggagaccatcaccccctggaacttcgaggaggtggtggacaagggcgcctccgcccagtccttcatcgagcggatgaccaacttcgacaagaacctgcccaacgagaaggtgctgcccaagcactccctgctgtacgagtacttcaccgtgtacaacgagctgaccaaggtgaagtacgtgaccgagggcatgcggaagcccgccttcctgtccggcgagcagaagaaggccatcgtggacctgctgttcaagaccaaccggaaggtgaccgtgaagcagctgaaggaggactacttcaagaagatcgagtgcttcgactccgtggagatctccggcgtggaggaccggttcaacgcctccctgggcacctaccacgacctgctgaagatcatcaaggacaaggacttcctggacaacgaggagaacgaggacatcctggaggacatcgtgctgaccctgaccctgttcgaggaccgggagatgatcgaggagcggctgaagacctacgcccacctgttcgacgacaaggtgatgaagcagctgaagcggcggcggtacaccggctggggccggctgtcccggaagctgatcaacggcatccgggacaagcagtccggcaagaccatcctggacttcctgaagtccgacggcttcgccaaccggaacttcatgcagctgatccacgacgactccctgaccttcaaggaggacatccagaaggcccaggtgtccggccagggcgactccctgcacgagcacatcgccaacctggccggctcccccgccatcaagaagggcatcctgcagaccgtgaaggtggtggacgagctggtgaaggtgatgggccggcacaagcccgagaacatcgtgatcgagatggcccgggagaaccagaccacccagaagggccagaagaactcccgggagcggatgaagcggatcgaggagggcatcaaggagctgggctcccagatcctgaaggagcaccccgtggagaacacccagctgcagaacgagaagctgtacctgtactacctgcagaacggccgggacatgtacgtggaccaggagctggacatcaaccggctgtccgactacgacgtggaccacatcgtgccccagtccttcctgaaggacgactccatcgacaacaaggtgctgacccggtccgacaagaaccggggcaagtccgacaacgtgccctccgaggaggtggtgaagaagatgaagaactactggcggcagctgctgaacgccaagctgatcacccagcggaagttcgacaacctgaccaaggccgagcggggcggcctgtccgagctggacaaggccggcttcatcaagcggcagctggtggagacccggcagatcaccaagcacgtggcccagatcctggactcccggatgaacaccaagtacgacgagaacgacaagctgatccgggaggtgaaggtgatcaccctgaagtccaagctggtgtccgacttccggaaggacttccagttctacaaggtgcgggagatcaacaactaccaccacgcccacgacgcctacctgaacgccgtggtgggcaccgccctgatcaagaagtaccccaagctggagtccgagttcgtgtacggcgactacaaggtgtacgacgtgcggaagatgatcgccaagtccgagcaggagatcggcaaggccaccgccaagtacttcttctactccaacatcatgaacttcttcaagaccgagatcaccctggccaacggcgagatccggaagcggcccctgatcgagaccaacggcgagaccggcgagatcgtgtgggacaagggccgggacttcgccaccgtgcggaaggtgctgtccatgccccaggtgaacatcgtgaagaagaccgaggtgcagaccggcggcttctccaaggagtccatcctgcccaagcggaactccgacaagctgatcgcccggaagaaggactgggaccccaagaagtacggcggcttcgactcccccaccgtggcctactccgtgctggtggtggccaaggtggagaagggcaagtccaagaagctgaagtccgtgaaggagctgctgggcatcaccatcatggagcggtcctccttcgagaagaaccccatcgacttcctggaggccaagggctacaaggaggtgaagaaggacctgatcatcaagctgcccaagtactccctgttcgagctggagaacggccggaagcggatgctggcctccgccggcgagctgcagaagggcaacgagctggccctgccctccaagtacgtgaacttcctgtacctggcctcccactacgagaagctgaagggctcccccgaggacaacgagcagaagcagctgttcgtggagcagcacaagcactacctggacgagatcatcgagcagatctccgagttctccaagcgggtgatcctggccgacgccaacctggacaaggtgctgtccgcctacaacaagcaccgggacaagcccatccgggagcaggccgagaacatcatccacctgttcaccctgaccaacctgggcgcccccgccgccttcaagtacttcgacaccaccatcgaccggaagcggtacacctccaccaaggaggtgctggacgccaccctgatccaccagtccatcaccggcctgtacgagacccggatcgacctgtcccagctgggcggcgacggcggcggctcccccaagaagaagcggaaggtgtga

SEQ ID NO: 828 - DNA, 4107 bp, synthetic construct
  misc_feature 1..4107: note = Synthetic
  source 1..4107: mol_type = other DNA
atggacaagaagtactccatcggcctggccatcggcaccaactccgtgggctgggccgtgatcaccgacgagtacaaggtgccctccaagaagttcaaggtgctgggcaacaccgaccggcactccatcaagaagaacctgatcggcgccctgctgttcgactccggcgagaccgccgaggccacccggctgaagcggaccgcccggcggcggtacacccggcggaagaaccggatctgctacctgcaggagatcttctccaacgagatggccaaggtggacgactccttcttccaccggctggaggagtccttcctggtggaggaggacaagaagcacgagcggcaccccatcttcggcaacatcgtggacgaggtggcctaccacgagaagtaccccaccatctaccacctgcggaagaagctggtggactccaccgacaaggccgacctgcggctgatctacctggccctggcccacatgatcaagttccggggccacttcctgatcgagggcgacctgaaccccgacaactccgacgtggacaagctgttcatccagctggtgcagacctacaaccagctgttcgaggagaaccccatcaacgcctccggcgtggacgccaaggccatcctgtccgcccggctgtccaagtcccggcggctggagaacctgatcgcccagctgcccggcgagaagaagaacggcctgttcggcaacctgatcgccctgtccctgggcctgacccccaacttcaagtccaacttcgacctggccgaggacgccaagctgcagctgtccaaggacacctacgacgacgacctggacaacctgctggcccagatcggcgaccagtacgccgacctgttcctggccgccaagaacctgtccgacgccatcctgctgtccgacatcctgcgggtgaacaccgagatcaccaaggcccccctgtccgcctccatgatcaagcggtacgacgagcaccaccaggacctgaccctgctgaaggccctggtgcggcagcagctgcccgagaagtacaaggagatcttcttcgaccagtccaagaacggctacgccggctacatcgacggcggcgcctcccaggaggagttctacaagttcatcaagcccatcctggagaagatggacggcaccgaggagctgctggtgaagctgaaccgggaggacctgctgcggaagcagcggaccttcgacaacggctccatcccccaccagatccacctgggcgagctgcacgccatcctgcggcggcaggaggacttctaccccttcctgaaggacaaccgggagaagatcgagaagatcctgaccttccggatcccctactacgtgggccccctggcccggggcaactcccggttcgcctggatgacccggaagtccgaggagaccatcaccccctggaacttcgaggaggtggtggacaagggcgcctccgcccagtccttcatcgagcggatgaccaacttcgacaagaacctgcccaacgagaaggtgctgcccaagcactccctgctgtacgagtacttcaccgtgtacaacgagctgaccaaggtgaagtacgtgaccgagggcatgcggaagcccgccttcctgtccggcgagcagaagaaggccatcgtggacctgctgttcaagaccaaccggaaggtgaccgtgaagcagctgaaggaggactacttcaagaagatcgagtgcttcgactccgtggagatctccggcgtggaggaccggttcaacgcctccctgggcacctaccacgacctgctgaagatcatcaaggacaaggacttcctggacaacgaggagaacgaggacatcctggaggacatcgtgctgaccctgaccctgttcgaggaccgggagatgatcgaggagcggctgaagacctacgcccacctgttcgacgacaaggtgatgaagcagctgaagcggcggcggtacaccggctggggccggctgtcccggaagctgatcaacggcatccgggacaagcagtccggcaagaccatcctggacttcctgaagtccgacggcttcgccaaccggaacttcatgcagctgatccacgacgactccctgaccttcaaggaggacatccagaaggcccaggtgtccggccagggcgactccctgcacgagcacatcgccaacctggccggctcccccgccatcaagaagggcatcctgcagaccgtgaaggtggtggacgagctggtgaaggtgatgggccggcacaagcccgagaacatcgtgatcgagatggcccgggagaaccagaccacccagaagggccagaagaactcccgggagcggatgaagcggatcgaggagggcatcaaggagctgggctcccagatcctgaaggagcaccccgtggagaacacccagctgcagaacgagaagctgtacctgtactacctgcagaacggccgggacatgtacgtggaccaggagctggacatcaaccggctgtccgactacgacgtggaccacatcgtgccccagtccttcctgaaggacgactccatcgacaacaaggtgctgacccggtccgacaagaaccggggcaagtccgacaacgtgccctccgaggaggtggtgaagaagatgaagaactactggcggcagctgctgaacgccaagctgatcacccagcggaagttcgacaacctgaccaaggccgagcggggcggcctgtccgagctggacaaggccggcttcatcaagcggcagctggtggagacccggcagatcaccaagcacgtggcccagatcctggactcccggatgaacaccaagtacgacgagaacgacaagctgatccgggaggtgaaggtgatcaccctgaagtccaagctggtgtccgacttccggaaggacttccagttctacaaggtgcgggagatcaacaactaccaccacgcccacgacgcctacctgaacgccgtggtgggcaccgccctgatcaagaagtaccccaagctggagtccgagttcgtgtacggcgactacaaggtgtacgacgtgcggaagatgatcgccaagtccgagcaggagatcggcaaggccaccgccaagtacttcttctactccaacatcatgaacttcttcaagaccgagatcaccctggccaacggcgagatccggaagcggcccctgatcgagaccaacggcgagaccggcgagatcgtgtgggacaagggccgggacttcgccaccgtgcggaaggtgctgtccatgccccaggtgaacatcgtgaagaagaccgaggtgcagaccggcggcttctccaaggagtccatcctgcccaagcggaactccgacaagctgatcgcccggaagaaggactgggaccccaagaagtacggcggcttcgactcccccaccgtggcctactccgtgctggtggtggccaaggtggagaagggcaagtccaagaagctgaagtccgtgaaggagctgctgggcatcaccatcatggagcggtcctccttcgagaagaaccccatcgacttcctggaggccaagggctacaaggaggtgaagaaggacctgatcatcaagctgcccaagtactccctgttcgagctggagaacggccggaagcggatgctggcctccgccggcgagctgcagaagggcaacgagctggccctgccctccaagtacgtgaacttcctgtacctggcctcccactacgagaagctgaagggctcccccgaggacaacgagcagaagcagctgttcgtggagcagcacaagcactacctggacgagatcatcgagcagatctccgagttctccaagcgggtgatcctggccgacgccaacctggacaaggtgctgtccgcctacaacaagcaccgggacaagcccatccgggagcaggccgagaacatcatccacctgttcaccctgaccaacctgggcgcccccgccgccttcaagtacttcgacaccaccatcgaccggaagcggtacacctccaccaaggaggtgctggacgccaccctgatccaccagtccatcaccggcctgtacgagacccggatcgacctgtcccagctgggcggcgactga

SEQ ID NO: 829-830 - skipped (2 entries)

SEQ ID NO: 831 - protein, 1334 aa, synthetic construct
  REGION 1..1334: note = Synthetic
MDGSGGGSPKKKRKVEDKRPAATKKAGQAKKKKGGSGGGEASPASGPRHLMDPHIFTSNFNNGIGRHKTYLCYEVERLDNGTSVKMDQHRGFLHNQAKNLLCGFYGRHAELRFLDLVPSLQLDPAQIYRVTWFISWSPCFSWGCAGEVRAFLQENTHVRLRIFAARIYDYDPLYKEALQMLRDAGAQVSIMTYDEFKHCWDTFVDHQGCPFQPWDGLDEHSQALSGRLRAILQNQGNSGSETPGTSESATPESAAFKPNPINYILGLAIGIASVGWAMVEIDEEENPIRLIDLGVRVFERAEVPKTGDSLAMARRLARSVRRLTRRRAHRLLRARRLLKREGVLQAADFDENGLIKSLPNTPWQLRAAALDRKLTPLEWSAVLLHLIKHRGYLSQRKNEGETADKELGALLKGVANNAHALQTGDFRTPAELALNKFEKESGHIRNQRGDYSHTFSRKDLQAELILLFEKQKEFGNPHVSGGLKEGIETLLMTQRPALSGDAVQKMLGHCTFEPAEPKAAKNTYTAERFIWLTKLNNLRILEQGSERPLTDTERATLMDEPYRKSKLTYAQARKLLGLEDTAFFKGLRYGKDNAEASTLMEMKAYHAISRALEKEGLKDKKSPLNLSSELQDEIGTAFSLFKTDEDITGRLKDRVQPEILEALLKHISFDKFVQISLKALRRIVPLMEQGKRYDEACAEIYGDHYGKKNTEEKIYLPPIPADEIRNPVVLRALSQARKVINGVVRRYGSPARIHIETAREVGKSFKDRKEIEKRQEENRKDREKAAAKFREYFPNFVGEPKSKDILKLRLYEQQHGKCLYSGKEINLVRLNEKGYVEIDHALPFSRTWDDSFNNKVLVLGSENQNKGNQTPYEYFNGKDNSREWQEFKARVETSRFPRSKKQRILLQKFDEDGFKECNLNDTRYVNRFLCQFVADHILLTGKGKRRVFASNGQITNLLRGFWGLRKVRAENDRHHALDAVVVACSTVAMQQKITRFVRYKEMNAFDGKTIDKETGKVLHQKTHFPQPWEFFAQEVMIRVFGKPDGKPEFEEADTPEKLRTLLAEKLSSRPEAVHEYVTPLFVSRAPNRKMSGAHKDTLRSAKRFVKHNEKISVKRVWLTEIKLADLENMVNYKNGREIELYEALKARLEAYGGNAKQAFDPKDNPFYKKGGQLVKAVRVEKTQESGVLLNKKNAYTIADNGDMVRVDVFCKVDKKGKNQYFIVPIYAWQVAENILPDIDCKGYRIDDSYTFCFSLHKYDLIAFQKDEKSKVEFAYYINCDSSNGRFYLAWHDKGSKEQQFRISTQNLVLIQKYQVNELGKEIRPCRLKKRPPVR

SEQ ID NO: 832 - protein, 1082 aa, synthetic construct
  REGION 1..1082: note = Synthetic
MAAFKPNPINYILGLDIGIASVGWAMVEIDEEENPIRLIDLGVRVFERAEVPKTGDSLAMARRLARSVRRLTRRRAHRLLRARRLLKREGVLQAADFDENGLIKSLPNTPWQLRAAALDRKLTPLEWSAVLLHLIKHRGYLSQRKNEGETADKELGALLKGVANNAHALQTGDFRTPAELALNKFEKESGHIRNQRGDYSHTFSRKDLQAELILLFEKQKEFGNPHVSGGLKEGIETLLMTQRPALSGDAVQKMLGHCTFEPAEPKAAKNTYTAERFIWLTKLNNLRILEQGSERPLTDTERATLMDEPYRKSKLTYAQARKLLGLEDTAFFKGLRYGKDNAEASTLMEMKAYHAISRALEKEGLKDKKSPLNLSSELQDEIGTAFSLFKTDEDITGRLKDRVQPEILEALLKHISFDKFVQISLKALRRIVPLMEQGKRYDEACAEIYGDHYGKKNTEEKIYLPPIPADEIRNPVVLRALSQARKVINGVVRRYGSPARIHIETAREVGKSFKDRKEIEKRQEENRKDREKAAAKFREYFPNFVGEPKSKDILKLRLYEQQHGKCLYSGKEINLVRLNEKGYVEIDHALPFSRTWDDSFNNKVLVLGSENQNKGNQTPYEYFNGKDNSREWQEFKARVETSRFPRSKKQRILLQKFDEDGFKECNLNDTRYVNRFLCQFVADHILLTGKGKRRVFASNGQITNLLRGFWGLRKVRAENDRHHALDAVVVACSTVAMQQKITRFVRYKEMNAFDGKTIDKETGKVLHQKTHFPQPWEFFAQEVMIRVFGKPDGKPEFEEADTPEKLRTLLAEKLSSRPEAVHEYVTPLFVSRAPNRKMSGAHKDTLRSAKRFVKHNEKISVKRVWLTEIKLADLENMVNYKNGREIELYEALKARLEAYGGNAKQAFDPKDNPFYKKGGQLVKAVRVEKTQESGVLLNKKNAYTIADNGDMVRVDVFCKVDKKGKNQYFIVPIYAWQVAENILPDIDCKGYRIDDSYTFCFSLHKYDLIAFQKDEKSKVEFAYYINCDSSNGRFYLAWHDKGSKEQQFRISTQNLVLIQKYQVNELGKEIRPCRLKKRPPVR

SEQ ID NO: 833 - protein, 1139 aa, synthetic construct
  REGION 1..1139: note = Synthetic
MDGSGGGSPKKKRKVEDKRPAATKKAGQAKKKKGGSGGGAAFKPNPINYILGLDIGIASVGWAMVEIDEEENPIRLIDLGVRVFERAEVPKTGDSLAMARRLARSVRRLTRRRAHRLLRARRLLKREGVLQAADFDENGLIKSLPNTPWQLRAAALDRKLTPLEWSAVLLHLIKHRGYLSQRKNEGETADKELGALLKGVANNAHALQTGDFRTPAELALNKFEKESGHIRNQRGDYSHTFSRKDLQAELILLFEKQKEFGNPHVSGGLKEGIETLLMTQRPALSGDAVQKMLGHCTFEPAEPKAAKNTYTAERFIWLTKLNNLRILEQGSERPLTDTERATLMDEPYRKSKLTYAQARKLLGLEDTAFFKGLRYGKDNAEASTLMEMKAYHAISRALEKEGLKDKKSPLNLSSELQDEIGTAFSLFKTDEDITGRLKDRVQPEILEALLKHISFDKFVQISLKALRRIVPLMEQGKRYDEACAEIYGDHYGKKNTEEKIYLPPIPADEIRNPVVLRALSQARKVINGVVRRYGSPARIHIETAREVGKSFKDRKEIEKRQEENRKDREKAAAKFREYFPNFVGEPKSKDILKLRLYEQQHGKCLYSGKEINLVRLNEKGYVEIDHALPFSRTWDDSFNNKVLVLGSENQNKGNQTPYEYFNGKDNSREWQEFKARVETSRFPRSKKQRILLQKFDEDGFKECNLNDTRYVNRFLCQFVADHILLTGKGKRRVFASNGQITNLLRGFWGLRKVRAENDRHHALDAVVVACSTVAMQQKITRFVRYKEMNAFDGKTIDKETGKVLHQKTHFPQPWEFFAQEVMIRVFGKPDGKPEFEEADTPEKLRTLLAEKLSSRPEAVHEYVTPLFVSRAPNRKMSGAHKDTLRSAKRFVKHNEKISVKRVWLTEIKLADLENMVNYKNGREIELYEALKARLEAYGGNAKQAFDPKDNPFYKKGGQLVKAVRVEKTQESGVLLNKKNAYTIADNGDMVRVDVFCKVDKKGKNQYFIVPIYAWQVAENILPDIDCKGYRIDDSYTFCFSLHKYDLIAFQKDEKSKVEFAYYINCDSSNGRFYLAWHDKGSKEQQFRISTQNLVLIQKYQVNELGKEIRPCRLKKRPPVRSESATPESVSGWRLFKKIS

SEQ ID NO: 834 - protein, 1082 aa, synthetic construct
  REGION 1..1082: note = Synthetic
MAAFKPNPINYILGLAIGIASVGWAMVEIDEEENPIRLIDLGVRVFERAEVPKTGDSLAMARRLARSVRRLTRRRAHRLLRARRLLKREGVLQAADFDENGLIKSLPNTPWQLRAAALDRKLTPLEWSAVLLHLIKHRGYLSQRKNEGETADKELGALLKGVANNAHALQTGDFRTPAELALNKFEKESGHIRNQRGDYSHTFSRKDLQAELILLFEKQKEFGNPHVSGGLKEGIETLLMTQRPALSGDAVQKMLGHCTFEPAEPKAAKNTYTAERFIWLTKLNNLRILEQGSERPLTDTERATLMDEPYRKSKLTYAQARKLLGLEDTAFFKGLRYGKDNAEASTLMEMKAYHAISRALEKEGLKDKKSPLNLSSELQDEIGTAFSLFKTDEDITGRLKDRVQPEILEALLKHISFDKFVQISLKALRRIVPLMEQGKRYDEACAEIYGDHYGKKNTEEKIYLPPIPADEIRNPVVLRALSQARKVINGVVRRYGSPARIHIETAREVGKSFKDRKEIEKRQEENRKDREKAAAKFREYFPNFVGEPKSKDILKLRLYEQQHGKCLYSGKEINLVRLNEKGYVEIDHALPFSRTWDDSFNNKVLVLGSENQNKGNQTPYEYFNGKDNSREWQEFKARVETSRFPRSKKQRILLQKFDEDGFKECNLNDTRYVNRFLCQFVADHILLTGKGKRRVFASNGQITNLLRGFWGLRKVRAENDRHHALDAVVVACSTVAMQQKITRFVRYKEMNAFDGKTIDKETGKVLHQKTHFPQPWEFFAQEVMIRVFGKPDGKPEFEEADTPEKLRTLLAEKLSSRPEAVHEYVTPLFVSRAPNRKMSGAHKDTLRSAKRFVKHNEKISVKRVWLTEIKLADLENMVNYKNGREIELYEALKARLEAYGGNAKQAFDPKDNPFYKKGGQLVKAVRVEKTQESGVLLNKKNAYTIADNGDMVRVDVFCKVDKKGKNQYFIVPIYAWQVAENILPDIDCKGYRIDDSYTFCFSLHKYDLIAFQKDEKSKVEFAYYINCDSSNGRFYLAWHDKGSKEQQFRISTQNLVLIQKYQVNELGKEIRPCRLKKRPPVR

SEQ ID NO: 835 - protein, 1334 aa, synthetic construct
  REGION 1..1334: note = Synthetic
MDGSGGGSPKKKRKVEDKRPAATKKAGQAKKKKGGSGGGEASPASGPRHLMDPHIFTSNFNNGIGRHKTYLCYEVERLDNGTSVKMDQHRGFLHNQAKNLLCGFYGRHAELRFLDLVPSLQLDPAQIYRVTWFISWSPCFSWGCAGEVRAFLQENTHVRLRIFAARIYDYDPLYKEALQMLRDAGAQVSIMTYDEFKHCWDTFVDHQGCPFQPWDGLDEHSQALSGRLRAILQNQGNGTKDSTKDIPETPSKDAAFKPNPINYILGLAIGIASVGWAMVEIDEEENPIRLIDLGVRVFERAEVPKTGDSLAMARRLARSVRRLTRRRAHRLLRARRLLKREGVLQAADFDENGLIKSLPNTPWQLRAAALDRKLTPLEWSAVLLHLIKHRGYLSQRKNEGETADKELGALLKGVANNAHALQTGDFRTPAELALNKFEKESGHIRNQRGDYSHTFSRKDLQAELILLFEKQKEFGNPHVSGGLKEGIETLLMTQRPALSGDAVQKMLGHCTFEPAEPKAAKNTYTAERFIWLTKLNNLRILEQGSERPLTDTERATLMDEPYRKSKLTYAQARKLLGLEDTAFFKGLRYGKDNAEASTLMEMKAYHAISRALEKEGLKDKKSPLNLSSELQDEIGTAFSLFKTDEDITGRLKDRVQPEILEALLKHISFDKFVQISLKALRRIVPLMEQGKRYDEACAEIYGDHYGKKNTEEKIYLPPIPADEIRNPVVLRALSQARKVINGVVRRYGSPARIHIETAREVGKSFKDRKEIEKRQEENRKDREKAAAKFREYFPNFVGEPKSKDILKLRLYEQQHGKCLYSGKEINLVRLNEKGYVEIDHALPFSRTWDDSFNNKVLVLGSENQNKGNQTPYEYFNGKDNSREWQEFKARVETSRFPRSKKQRILLQKFDEDGFKECNLNDTRYVNRFLCQFVADHILLTGKGKRRVFASNGQITNLLRGFWGLRKVRAENDRHHALDAVVVACSTVAMQQKITRFVRYKEMNAFDGKTIDKETGKVLHQKTHFPQPWEFFAQEVMIRVFGKPDGKPEFEEADTPEKLRTLLAEKLSSRPEAVHEYVTPLFVSRAPNRKMSGAHKDTLRSAKRFVKHNEKISVKRVWLTEIKLADLENMVNYKNGREIELYEALKARLEAYGGNAKQAFDPKDNPFYKKGGQLVKAVRVEKTQESGVLLNKKNAYTIADNGDMVRVDVFCKVDKKGKNQYFIVPIYAWQVAENILPDIDCKGYRIDDSYTFCFSLHKYDLIAFQKDEKSKVEFAYYINCDSSNGRFYLAWHDKGSKEQQFRISTQNLVLIQKYQVNELGKEIRPCRLKKRPPVR

SEQ ID NO: 836 - protein, 1317 aa, synthetic construct
  REGION 1..1317: note = Synthetic
MEASPASGPRHLMDPHIFTSNFNNGIGRHKTYLCYEVERLDNGTSVKMDQHRGFLHNQAKNLLCGFYGRHAELRFLDLVPSLQLDPAQIYRVTWFISWSPCFSWGCAGEVRAFLQENTHVRLRIFAARIYDYDPLYKEALQMLRDAGAQVSIMTYDEFKHCWDTFVDHQGCPFQPWDGLDEHSQALSGRLRAILQNQGNSGSETPGTSESATPESAAFKPNPINYILGLAIGIASVGWAMVEIDEEENPIRLIDLGVRVFERAEVPKTGDSLAMARRLARSVRRLTRRRAHRLLRARRLLKREGVLQAADFDENGLIKSLPNTPWQLRAAALDRKLTPLEWSAVLLHLIKHRGYLSQRKNEGETADKELGALLKGVANNAHALQTGDFRTPAELALNKFEKESGHIRNQRGDYSHTFSRKDLQAELILLFEKQKEFGNPHVSGGLKEGIETLLMTQRPALSGDAVQKMLGHCTFEPAEPKAAKNTYTAERFIWLTKLNNLRILEQGSERPLTDTERATLMDEPYRKSKLTYAQARKLLGLEDTAFFKGLRYGKDNAEASTLMEMKAYHAISRALEKEGLKDKKSPLNLSSELQDEIGTAFSLFKTDEDITGRLKDRVQPEILEALLKHISFDKFVQISLKALRRIVPLMEQGKRYDEACAEIYGDHYGKKNTEEKIYLPPIPADEIRNPVVLRALSQARKVINGVVRRYGSPARIHIETAREVGKSFKDRKEIEKRQEENRKDREKAAAKFREYFPNFVGEPKSKDILKLRLYEQQHGKCLYSGKEINLVRLNEKGYVEIDHALPFSRTWDDSFNNKVLVLGSENQNKGNQTPYEYFNGKDNSREWQEFKARVETSRFPRSKKQRILLQKFDEDGFKECNLNDTRYVNRFLCQFVADHILLTGKGKRRVFASNGQITNLLRGFWGLRKVRAENDRHHALDAVVVACSTVAMQQKITRFVRYKEMNAFDGKTIDKETGKVLHQKTHFPQPWEFFAQEVMIRVFGKPDGKPEFEEADTPEKLRTLLAEKLSSRPEAVHEYVTPLFVSRAPNRKMSGAHKDTLRSAKRFVKHNEKISVKRVWLTEIKLADLENMVNYKNGREIELYEALKARLEAYGGNAKQAFDPKDNPFYKKGGQLVKAVRVEKTQESGVLLNKKNAYTIADNGDMVRVDVFCKVDKKGKNQYFIVPIYAWQVAENILPDIDCKGYRIDDSYTFCFSLHKYDLIAFQKDEKSKVEFAYYINCDSSNGRFYLAWHDKGSKEQQFRISTQNLVLIQKYQVNELGKEIRPCRLKKRPPVRSGKRTADGSEFESPKKKRKVE

SEQ ID NO: 837 - protein, 1355 aa, synthetic construct
  REGION 1..1355: note = Synthetic
MDGSGGGSPKKKRKVEDKRPAATKKAGQAKKKKGGSGGGEASPASGPRHLMDPHIFTSNFNNGIGRHKTYLCYEVERLDNGTSVKMDQHRGFLHNQAKNLLCGFYGRHAELRFLDLVPSLQLDPAQIYRVTWFISWSPCFSWGCAGEVRAFLQENTHVRLRIFAARIYDYDPLYKEALQMLRDAGAQVSIMTYDEFKHCWDTFVDHQGCPFQPWDGLDEHSQALSGRLRAILQNQGNSGSETPGTSESATPESAAFKPNPINYILGLAIGIASVGWAMVEIDEEENPIRLIDLGVRVFERAEVPKTGDSLAMARRLARSVRRLTRRRAHRLLRARRLLKREGVLQAADFDENGLIKSLPNTPWQLRAAALDRKLTPLEWSAVLLHLIKHRGYLSQRKNEGETADKELGALLKGVANNAHALQTGDFRTPAELALNKFEKESGHIRNQRGDYSHTFSRKDLQAELILLFEKQKEFGNPHVSGGLKEGIETLLMTQRPALSGDAVQKMLGHCTFEPAEPKAAKNTYTAERFIWLTKLNNLRILEQGSERPLTDTERATLMDEPYRKSKLTYAQARKLLGLEDTAFFKGLRYGKDNAEASTLMEMKAYHAISRALEKEGLKDKKSPLNLSSELQDEIGTAFSLFKTDEDITGRLKDRVQPEILEALLKHISFDKFVQISLKALRRIVPLMEQGKRYDEACAEIYGDHYGKKNTEEKIYLPPIPADEIRNPVVLRALSQARKVINGVVRRYGSPARIHIETAREVGKSFKDRKEIEKRQEENRKDREKAAAKFREYFPNFVGEPKSKDILKLRLYEQQHGKCLYSGKEINLVRLNEKGYVEIDHALPFSRTWDDSFNNKVLVLGSENQNKGNQTPYEYFNGKDNSREWQEFKARVETSRFPRSKKQRILLQKFDEDGFKECNLNDTRYVNRFLCQFVADHILLTGKGKRRVFASNGQITNLLRGFWGLRKVRAENDRHHALDAVVVACSTVAMQQKITRFVRYKEMNAFDGKTIDKETGKVLHQKTHFPQPWEFFAQEVMIRVFGKPDGKPEFEEADTPEKLRTLLAEKLSSRPEAVHEYVTPLFVSRAPNRKMSGAHKDTLRSAKRFVKHNEKISVKRVWLTEIKLADLENMVNYKNGREIELYEALKARLEAYGGNAKQAFDPKDNPFYKKGGQLVKAVRVEKTQESGVLLNKKNAYTIADNGDMVRVDVFCKVDKKGKNQYFIVPIYAWQVAENILPDIDCKGYRIDDSYTFCFSLHKYDLIAFQKDEKSKVEFAYYINCDSSNGRFYLAWHDKGSKEQQFRISTQNLVLIQKYQVNELGKEIRPCRLKKRPPVRSGKRTADGSEFESPKKKRKVE

SEQ ID NO: 838 - protein, 1393 aa, synthetic construct
  REGION 1..1393: note = Synthetic
MDGSGGGSPKKKRKVEDKRPAATKKAGQAKKKKGGSGGGEASPASGPRHLMDPHIFTSNFNNGIGRHKTYLCYEVERLDNGTSVKMDQHRGFLHNQAKNLLCGFYGRHAELRFLDLVPSLQLDPAQIYRVTWFISWSPCFSWGCAGEVRAFLQENTHVRLRIFAARIYDYDPLYKEALQMLRDAGAQVSIMTYDEFKHCWDTFVDHQGCPFQPWDGLDEHSQALSGRLRAILQNQGNSGSETPGTSESATPESAAFKPNPINYILGLAIGIASVGWAMVEIDEEENPIRLIDLGVRVFERAEVPKTGDSLAMARRLARSVRRLTRRRAHRLLRARRLLKREGVLQAADFDENGLIKSLPNTPWQLRAAALDRKLTPLEWSAVLLHLIKHRGYLSQRKNEGETADKELGALLKGVANNAHALQTGDFRTPAELALNKFEKESGHIRNQRGDYSHTFSRKDLQAELILLFEKQKEFGNPHVSGGLKEGIETLLMTQRPALSGDAVQKMLGHCTFEPAEPKAAKNTYTAERFIWLTKLNNLRILEQGSERPLTDTERATLMDEPYRKSKLTYAQARKLLGLEDTAFFKGLRYGKDNAEASTLMEMKAYHAISRALEKEGLKDKKSPLNLSSELQDEIGTAFSLFKTDEDITGRLKDRVQPEILEALLKHISFDKFVQISLKALRRIVPLMEQGKRYDEACAEIYGDHYGKKNTEEKIYLPPIPADEIRNPVVLRALSQARKVINGVVRRYGSPARIHIETAREVGKSFKDRKEIEKRQEENRKDREKAAAKFREYFPNFVGEPKSKDILKLRLYEQQHGKCLYSGKEINLVRLNEKGYVEIDHALPFSRTWDDSFNNKVLVLGSENQNKGNQTPYEYFNGKDNSREWQEFKARVETSRFPRSKKQRILLQKFDEDGFKECNLNDTRYVNRFLCQFVADHILLTGKGKRRVFASNGQITNLLRGFWGLRKVRAENDRHHALDAVVVACSTVAMQQKITRFVRYKEMNAFDGKTIDKETGKVLHQKTHFPQPWEFFAQEVMIRVFGKPDGKPEFEEADTPEKLRTLLAEKLSSRPEAVHEYVTPLFVSRAPNRKMSGAHKDTLRSAKRFVKHNEKISVKRVWLTEIKLADLENMVNYKNGREIELYEALKARLEAYGGNAKQAFDPKDNPFYKKGGQLVKAVRVEKTQESGVLLNKKNAYTIADNGDMVRVDVFCKVDKKGKNQYFIVPIYAWQVAENILPDIDCKGYRIDDSYTFCFSLHKYDLIAFQKDEKSKVEFAYYINCDSSNGRFYLAWHDKGSKEQQFRISTQNLVLIQKYQVNELGKEIRPCRLKKRPPVREDKRPAATKKAGQAKKKKYPYDVPDYAGYPYDVPDYAGSYPYDVPDYAAAPAAKKKKLD

SEQ ID NO: 839-849 - skipped (11 entries)

SEQ ID NO: 850 - protein, 199 aa, synthetic construct
  REGION 1..199: note = Synthetic
MEASPASGPRHLMDPHIFTSNFNNGIGRHKTYLCYEVERLDNGTSVKMDQHRGFLHNQAKNLLCGFYGRHAELRFLDLVPSLQLDPAQIYRVTWFISWSPCFSWGCAGEVRAFLQENTHVRLRIFAARIYDYDPLYKEALQMLRDAGAQVSIMTYDEFKHCWDTFVDHQGCPFQPWDGLDEHSQALSGRLRAILQNQGN

SEQ ID NO: 851 - protein, 1593 aa, synthetic construct
  REGION 1..1593: note = Synthetic
MEASPASGPRHLMDPHIFTSNFNNGIGRHKTYLCYEVERLDNGTSVKMDQHRGFLHNQAKNLLCGFYGRHAELRFLDLVPSLQLDPAQIYRVTWFISWSPCFSWGCAGEVRAFLQENTHVRLRIFAARIYDYDPLYKEALQMLRDAGAQVSIMTYDEFKHCWDTFVDHQGCPFQPWDGLDEHSQALSGRLRAILQNQGNSGSETPGTSESATPESDKKYSIGLAIGTNSVGWAVITDEYKVPSKKFKVLGNTDRHSIKKNLIGALLFDSGETAEATRLKRTARRRYTRRKNRICYLQEIFSNEMAKVDDSFFHRLEESFLVEEDKKHERHPIFGNIVDEVAYHEKYPTIYHLRKKLVDSTDKADLRLIYLALAHMIKFRGHFLIEGDLNPDNSDVDKLFIQLVQTYNQLFEENPINASGVDAKAILSARLSKSRRLENLIAQLPGEKKNGLFGNLIALSLGLTPNFKSNFDLAEDAKLQLSKDTYDDDLDNLLAQIGDQYADLFLAAKNLSDAILLSDILRVNTEITKAPLSASMIKRYDEHHQDLTLLKALVRQQLPEKYKEIFFDQSKNGYAGYIDGGASQEEFYKFIKPILEKMDGTEELLVKLNREDLLRKQRTFDNGSIPHQIHLGELHAILRRQEDFYPFLKDNREKIEKILTFRIPYYVGPLARGNSRFAWMTRKSEETITPWNFEEVVDKGASAQSFIERMTNFDKNLPNEKVLPKHSLLYEYFTVYNELTKVKYVTEGMRKPAFLSGEQKKAIVDLLFKTNRKVTVKQLKEDYFKKIECFDSVEISGVEDRFNASLGTYHDLLKIIKDKDFLDNEENEDILEDIVLTLTLFEDREMIEERLKTYAHLFDDKVMKQLKRRRYTGWGRLSRKLINGIRDKQSGKTILDFLKSDGFANRNFMQLIHDDSLTFKEDIQKAQVSGQGDSLHEHIANLAGSPAIKKGILQTVKVVDELVKVMGRHKPENIVIEMARENQTTQKGQKNSRERMKRIEEGIKELGSQILKEHPVENTQLQNEKLYLYYLQNGRDMYVDQELDINRLSDYDVDHIVPQSFLKDDSIDNKVLTRSDKNRGKSDNVPSEEVVKKMKNYWRQLLNAKLITQRKFDNLTKAERGGLSELDKAGFIKRQLVETRQITKHVAQILDSRMNTKYDENDKLIREVKVITLKSKLVSDFRKDFQFYKVREINNYHHAHDAYLNAVVGTALIKKYPKLESEFVYGDYKVYDVRKMIAKSEQEIGKATAKYFFYSNIMNFFKTEITLANGEIRKRPLIETNGETGEIVWDKGRDFATVRKVLSMPQVNIVKKTEVQTGGFSKESILPKRNSDKLIARKKDWDPKKYGGFDSPTVAYSVLVVAKVEKGKSKKLKSVKELLGITIMERSSFEKNPIDFLEAKGYKEVKKDLIIKLPKYSLFELENGRKRMLASAGELQKGNELALPSKYVNFLYLASHYEKLKGSPEDNEQKQLFVEQHKHYLDEIIEQISEFSKRVILADANLDKVLSAYNKHRDKPIREQAENIIHLFTLTNLGAPAAFKYFDTTIDRKRYTSTKEVLDATLIHQSITGLYETRIDLSQLGGDGGGSPKKKRKV

SEQ ID NO: 852 - protein, 1612 aa, synthetic construct
  REGION 1..1612: note = Synthetic
MEASPASGPRHLMDPHIFTSNFNNGIGRHKTYLCYEVERLDNGTSVKMDQHRGFLHNQAKNLLCGFYGRHAELRFLDLVPSLQLDPAQIYRVTWFISWSPCFSWGCAGEVRAFLQENTHVRLRIFAARIYDYDPLYKEALQMLRDAGAQVSIMTYDEFKHCWDTFVDHQGCPFQPWDGLDEHSQALSGRLRAILQNQGNSGSETPGTSESATPESDKKYSIGLAIGTNSVGWAVITDEYKVPSKKFKVLGNTDRHSIKKNLIGALLFDSGETAEATRLKRTARRRYTRRKNRICYLQEIFSNEMAKVDDSFFHRLEESFLVEEDKKHERHPIFGNIVDEVAYHEKYPTIYHLRKKLVDSTDKADLRLIYLALAHMIKFRGHFLIEGDLNPDNSDVDKLFIQLVQTYNQLFEENPINASGVDAKAILSARLSKSRRLENLIAQLPGEKKNGLFGNLIALSLGLTPNFKSNFDLAEDAKLQLSKDTYDDDLDNLLAQIGDQYADLFLAAKNLSDAILLSDILRVNTEITKAPLSASMIKRYDEHHQDLTLLKALVRQQLPEKYKEIFFDQSKNGYAGYIDGGASQEEFYKFIKPILEKMDGTEELLVKLNREDLLRKQRTFDNGSIPHQIHLGELHAILRRQEDFYPFLKDNREKIEKILTFRIPYYVGPLARGNSRFAWMTRKSEETITPWNFEEVVDKGASAQSFIERMTNFDKNLPNEKVLPKHSLLYEYFTVYNELTKVKYVTEGMRKPAFLSGEQKKAIVDLLFKTNRKVTVKQLKEDYFKKIECFDSVEISGVEDRFNASLGTYHDLLKIIKDKDFLDNEENEDILEDIVLTLTLFEDREMIEERLKTYAHLFDDKVMKQLKRRRYTGWGRLSRKLINGIRDKQSGKTILDFLKSDGFANRNFMQLIHDDSLTFKEDIQKAQVSGQGDSLHEHIANLAGSPAIKKGILQTVKVVDELVKVMGRHKPENIVIEMARENQTTQKGQKNSRERMKRIEEGIKELGSQILKEHPVENTQLQNEKLYLYYLQNGRDMYVDQELDINRLSDYDVDHIVPQSFLKDDSIDNKVLTRSDKNRGKSDNVPSEEVVKKMKNYWRQLLNAKLITQRKFDNLTKAERGGLSELDKAGFIKRQLVETRQITKHVAQILDSRMNTKYDENDKLIREVKVITLKSKLVSDFRKDFQFYKVREINNYHHAHDAYLNAVVGTALIKKYPKLESEFVYGDYKVYDVRKMIAKSEQEIGKATAKYFFYSNIMNFFKTEITLANGEIRKRPLIETNGETGEIVWDKGRDFATVRKVLSMPQVNIVKKTEVQTGGFSKESILPKRNSDKLIARKKDWDPKKYGGFDSPTVAYSVLVVAKVEKGKSKKLKSVKELLGITIMERSSFEKNPIDFLEAKGYKEVKKDLIIKLPKYSLFELENGRKRMLASAGELQKGNELALPSKYVNFLYLASHYEKLKGSPEDNEQKQLFVEQHKHYLDEIIEQISEFSKRVILADANLDKVLSAYNKHRDKPIREQAENIIHLFTLTNLGAPAAFKYFDTTIDRKRYTSTKEVLDATLIHQSITGLYETRIDLSQLGGDGGGSPKKKRKVSESATPESVSGWRLFKKIS

SEQ ID NO: 853 - protein, 1379 aa, synthetic construct
  REGION 1..1379: note = Synthetic
MDKKYSIGLDIGTNSVGWAVITDEYKVPSKKFKVLGNTDRHSIKKNLIGALLFDSGETAEATRLKRTARRRYTRRKNRICYLQEIFSNEMAKVDDSFFHRLEESFLVEEDKKHERHPIFGNIVDEVAYHEKYPTIYHLRKKLVDSTDKADLRLIYLALAHMIKFRGHFLIEGDLNPDNSDVDKLFIQLVQTYNQLFEENPINASGVDAKAILSARLSKSRRLENLIAQLPGEKKNGLFGNLIALSLGLTPNFKSNFDLAEDAKLQLSKDTYDDDLDNLLAQIGDQYADLFLAAKNLSDAILLSDILRVNTEITKAPLSASMIKRYDEHHQDLTLLKALVRQQLPEKYKEIFFDQSKNGYAGYIDGGASQEEFYKFIKPILEKMDGTEELLVKLNREDLLRKQRTFDNGSIPHQIHLGELHAILRRQEDFYPFLKDNREKIEKILTFRIPYYVGPLARGNSRFAWMTRKSEETITPWNFEEVVDKGASAQSFIERMTNFDKNLPNEKVLPKHSLLYEYFTVYNELTKVKYVTEGMRKPAFLSGEQKKAIVDLLFKTNRKVTVKQLKEDYFKKIECFDSVEISGVEDRFNASLGTYHDLLKIIKDKDFLDNEENEDILEDIVLTLTLFEDREMIEERLKTYAHLFDDKVMKQLKRRRYTGWGRLSRKLINGIRDKQSGKTILDFLKSDGFANRNFMQLIHDDSLTFKEDIQKAQVSGQGDSLHEHIANLAGSPAIKKGILQTVKVVDELVKVMGRHKPENIVIEMARENQTTQKGQKNSRERMKRIEEGIKELGSQILKEHPVENTQLQNEKLYLYYLQNGRDMYVDQELDINRLSDYDVDHIVPQSFLKDDSIDNKVLTRSDKNRGKSDNVPSEEVVKKMKNYWRQLLNAKLITQRKFDNLTKAERGGLSELDKAGFIKRQLVETRQITKHVAQILDSRMNTKYDENDKLIREVKVITLKSKLVSDFRKDFQFYKVREINNYHHAHDAYLNAVVGTALIKKYPKLESEFVYGDYKVYDVRKMIAKSEQEIGKATAKYFFYSNIMNFFKTEITLANGEIRKRPLIETNGETGEIVWDKGRDFATVRKVLSMPQVNIVKKTEVQTGGFSKESILPKRNSDKLIARKKDWDPKKYGGFDSPTVAYSVLVVAKVEKGKSKKLKSVKELLGITIMERSSFEKNPIDFLEAKGYKEVKKDLIIKLPKYSLFELENGRKRMLASAGELQKGNELALPSKYVNFLYLASHYEKLKGSPEDNEQKQLFVEQHKHYLDEIIEQISEFSKRVILADANLDKVLSAYNKHRDKPIREQAENIIHLFTLTNLGAPAAFKYFDTTIDRKRYTSTKEVLDATLIHQSITGLYETRIDLSQLGGDGGGSPKKKRKV

SEQ ID NO: 854 - protein, 1398 aa, synthetic construct
  REGION 1..1398: note = Synthetic
MDKKYSIGLDIGTNSVGWAVITDEYKVPSKKFKVLGNTDRHSIKKNLIGALLFDSGETAEATRLKRTARRRYTRRKNRICYLQEIFSNEMAKVDDSFFHRLEESFLVEEDKKHERHPIFGNIVDEVAYHEKYPTIYHLRKKLVDSTDKADLRLIYLALAHMIKFRGHFLIEGDLNPDNSDVDKLFIQLVQTYNQLFEENPINASGVDAKAILSARLSKSRRLENLIAQLPGEKKNGLFGNLIALSLGLTPNFKSNFDLAEDAKLQLSKDTYDDDLDNLLAQIGDQYADLFLAAKNLSDAILLSDILRVNTEITKAPLSASMIKRYDEHHQDLTLLKALVRQQLPEKYKEIFFDQSKNGYAGYIDGGASQEEFYKFIKPILEKMDGTEELLVKLNREDLLRKQRTFDNGSIPHQIHLGELHAILRRQEDFYPFLKDNREKIEKILTFRIPYYVGPLARGNSRFAWMTRKSEETITPWNFEEVVDKGASAQSFIERMTNFDKNLPNEKVLPKHSLLYEYFTVYNELTKVKYVTEGMRKPAFLSGEQKKAIVDLLFKTNRKVTVKQLKEDYFKKIECFDSVEISGVEDRFNASLGTYHDLLKIIKDKDFLDNEENEDILEDIVLTLTLFEDREMIEERLKTYAHLFDDKVMKQLKRRRYTGWGRLSRKLINGIRDKQSGKTILDFLKSDGFANRNFMQLIHDDSLTFKEDIQKAQVSGQGDSLHEHIANLAGSPAIKKGILQTVKVVDELVKVMGRHKPENIVIEMARENQTTQKGQKNSRERMKRIEEGIKELGSQILKEHPVENTQLQNEKLYLYYLQNGRDMYVDQELDINRLSDYDVDHIVPQSFLKDDSIDNKVLTRSDKNRGKSDNVPSEEVVKKMKNYWRQLLNAKLITQRKFDNLTKAERGGLSELDKAGFIKRQLVETRQITKHVAQILDSRMNTKYDENDKLIREVKVITLKSKLVSDFRKDFQFYKVREINNYHHAHDAYLNAVVGTALIKKYPKLESEFVYGDYKVYDVRKMIAKSEQEIGKATAKYFFYSNIMNFFKTEITLANGEIRKRPLIETNGETGEIVWDKGRDFATVRKVLSMPQVNIVKKTEVQTGGFSKESILPKRNSDKLIARKKDWDPKKYGGFDSPTVAYSVLVVAKVEKGKSKKLKSVKELLGITIMERSSFEKNPIDFLEAKGYKEVKKDLIIKLPKYSLFELENGRKRMLASAGELQKGNELALPSKYVNFLYLASHYEKLKGSPEDNEQKQLFVEQHKHYLDEIIEQISEFSKRVILADANLDKVLSAYNKHRDKPIREQAENIIHLFTLTNLGAPAAFKYFDTTIDRKRYTSTKEVLDATLIHQSITGLYETRIDLSQLGGDGGGSPKKKRKVSESATPESVSGWRLFKKIS

SEQ ID NO: 855 - protein, 1379 aa, synthetic construct
  REGION 1..1379: note = Synthetic
MDKKYSIGLAIGTNSVGWAVITDEYKVPSKKFKVLGNTDRHSIKKNLIGALLFDSGETAEATRLKRTARRRYTRRKNRICYLQEIFSNEMAKVDDSFFHRLEESFLVEEDKKHERHPIFGNIVDEVAYHEKYPTIYHLRKKLVDSTDKADLRLIYLALAHMIKFRGHFLIEGDLNPDNSDVDKLFIQLVQTYNQLFEENPINASGVDAKAILSARLSKSRRLENLIAQLPGEKKNGLFGNLIALSLGLTPNFKSNFDLAEDAKLQLSKDTYDDDLDNLLAQIGDQYADLFLAAKNLSDAILLSDILRVNTEITKAPLSASMIKRYDEHHQDLTLLKALVRQQLPEKYKEIFFDQSKNGYAGYIDGGASQEEFYKFIKPILEKMDGTEELLVKLNREDLLRKQRTFDNGSIPHQIHLGELHAILRRQEDFYPFLKDNREKIEKILTFRIPYYVGPLARGNSRFAWMTRKSEETITPWNFEEVVDKGASAQSFIERMTNFDKNLPNEKVLPKHSLLYEYFTVYNELTKVKYVTEGMRKPAFLSGEQKKAIVDLLFKTNRKVTVKQLKEDYFKKIECFDSVEISGVEDRFNASLGTYHDLLKIIKDKDFLDNEENEDILEDIVLTLTLFEDREMIEERLKTYAHLFDDKVMKQLKRRRYTGWGRLSRKLINGIRDKQSGKTILDFLKSDGFANRNFMQLIHDDSLTFKEDIQKAQVSGQGDSLHEHIANLAGSPAIKKGILQTVKVVDELVKVMGRHKPENIVIEMARENQTTQKGQKNSRERMKRIEEGIKELGSQILKEHPVENTQLQNEKLYLYYLQNGRDMYVDQELDINRLSDYDVDHIVPQSFLKDDSIDNKVLTRSDKNRGKSDNVPSEEVVKKMKNYWRQLLNAKLITQRKFDNLTKAERGGLSELDKAGFIKRQLVETRQITKHVAQILDSRMNTKYDENDKLIREVKVITLKSKLVSDFRKDFQFYKVREINNYHHAHDAYLNAVVGTALIKKYPKLESEFVYGDYKVYDVRKMIAKSEQEIGKATAKYFFYSNIMNFFKTEITLANGEIRKRPLIETNGETGEIVWDKGRDFATVRKVLSMPQVNIVKKTEVQTGGFSKESILPKRNSDKLIARKKDWDPKKYGGFDSPTVAYSVLVVAKVEKGKSKKLKSVKELLGITIMERSSFEKNPIDFLEAKGYKEVKKDLIIKLPKYSLFELENGRKRMLASAGELQKGNELALPSKYVNFLYLASHYEKLKGSPEDNEQKQLFVEQHKHYLDEIIEQISEFSKRVILADANLDKVLSAYNKHRDKPIREQAENIIHLFTLTNLGAPAAFKYFDTTIDRKRYTSTKEVLDATLIHQSITGLYETRIDLSQLGGDGGGSPKKKRKV

SEQ ID NO: 856 - protein, 1368 aa, synthetic construct
  REGION 1..1368: note = Synthetic
MDKKYSIGLAIGTNSVGWAVITDEYKVPSKKFKVLGNTDRHSIKKNLIGALLFDSGETAEATRLKRTARRRYTRRKNRICYLQEIFSNEMAKVDDSFFHRLEESFLVEEDKKHERHPIFGNIVDEVAYHEKYPTIYHLRKKLVDSTDKADLRLIYLALAHMIKFRGHFLIEGDLNPDNSDVDKLFIQLVQTYNQLFEENPINASGVDAKAILSARLSKSRRLENLIAQLPGEKKNGLFGNLIALSLGLTPNFKSNFDLAEDAKLQLSKDTYDDDLDNLLAQIGDQYADLFLAAKNLSDAILLSDILRVNTEITKAPLSASMIKRYDEHHQDLTLLKALVRQQLPEKYKEIFFDQSKNGYAGYIDGGASQEEFYKFIKPILEKMDGTEELLVKLNREDLLRKQRTFDNGSIPHQIHLGELHAILRRQEDFYPFLKDNREKIEKILTFRIPYYVGPLARGNSRFAWMTRKSEETITPWNFEEVVDKGASAQSFIERMTNFDKNLPNEKVLPKHSLLYEYFTVYNELTKVKYVTEGMRKPAFLSGEQKKAIVDLLFKTNRKVTVKQLKEDYFKKIECFDSVEISGVEDRFNASLGTYHDLLKIIKDKDFLDNEENEDILEDIVLTLTLFEDREMIEERLKTYAHLFDDKVMKQLKRRRYTGWGRLSRKLINGIRDKQSGKTILDFLKSDGFANRNFMQLIHDDSLTFKEDIQKAQVSGQGDSLHEHIANLAGSPAIKKGILQTVKVVDELVKVMGRHKPENIVIEMARENQTTQKGQKNSRERMKRIEEGIKELGSQILKEHPVENTQLQNEKLYLYYLQNGRDMYVDQELDINRLSDYDVDHIVPQSFLKDDSIDNKVLTRSDKNRGKSDNVPSEEVVKKMKNYWRQLLNAKLITQRKFDNLTKAERGGLSELDKAGFIKRQLVETRQITKHVAQILDSRMNTKYDENDKLIREVKVITLKSKLVSDFRKDFQFYKVREINNYHHAHDAYLNAVVGTALIKKYPKLESEFVYGDYKVYDVRKMIAKSEQEIGKATAKYFFYSNIMNFFKTEITLANGEIRKRPLIETNGETGEIVWDKGRDFATVRKVLSMPQVNIVKKTEVQTGGFSKESILPKRNSDKLIARKKDWDPKKYGGFDSPTVAYSVLVVAKVEKGKSKKLKSVKELLGITIMERSSFEKNPIDFLEAKGYKEVKKDLIIKLPKYSLFELENGRKRMLASAGELQKGNELALPSKYVNFLYLASHYEKLKGSPEDNEQKQLFVEQHKHYLDEIIEQISEFSKRVILADANLDKVLSAYNKHRDKPIREQAENIIHLFTLTNLGAPAAFKYFDTTIDRKRYTSTKEVLDATLIHQSITGLYETRIDLSQLGGD

SEQ ID NO: 857 - protein, 1391 aa, synthetic construct
  REGION 1..1391: note = Synthetic
DKKYSIGLAIGTNSVGWAVITDEYKVPSKKFKVLGNTDRHSIKKNLIGALLFDSGETAEATRLKRTARRRYTRRKNRICYLQEIFSNEMAKVDDSFFHRLEESFLVEEDKKHERHPIFGNIVDEVAYHEKYPTIYHLRKKLVDSTDKADLRLIYLALAHMIKFRGHFLIEGDLNPDNSDVDKLFIQLVQTYNQLFEENPINASGVDAKAILSARLSKSRRLENLIAQLPGEKKNGLFGNLIALSLGLTPNFKSNFDLAEDAKLQLSKDTYDDDLDNLLAQIGDQYADLFLAAKNLSDAILLSDILRVNTEITKAPLSASMIKRYDEHHQDLTLLKALVRQQLPEKYKEIFFDQSKNGYAGYIDGGASQEEFYKFIKPILEKMDGTEELLVKLNREDLLRKQRTFDNGSIPHQIHLGELHAILRRQEDFYPFLKDNREKIEKILTFRIPYYVGPLARGNSRFAWMTRKSEETITPWNFEEVVDKGASAQSFIERMTNFDKNLPNEKVLPKHSLLYEYFTVYNELTKVKYVTEGMRKPAFLSGEQKKAIVDLLFKTNRKVTVKQLKEDYFKKIECFDSVEISGVEDRFNASLGTYHDLLKIIKDKDFLDNEENEDILEDIVLTLTLFEDREMIEERLKTYAHLFDDKVMKQLKRRRYTGWGRLSRKLINGIRDKQSGKTILDFLKSDGFANRNFMQLIHDDSLTFKEDIQKAQVSGQGDSLHEHIANLAGSPAIKKGILQTVKVVDELVKVMGRHKPENIVIEMARENQTTQKGQKNSRERMKRIEEGIKELGSQILKEHPVENTQLQNEKLYLYYLQNGRDMYVDQELDINRLSDYDVDHIVPQSFLKDDSIDNKVLTRSDKNRGKSDNVPSEEVVKKMKNYWRQLLNAKLITQRKFDNLTKAERGGLSELDKAGFIKRQLVETRQITKHVAQILDSRMNTKYDENDKLIREVKVITLKSKLVSDFRKDFQFYKVREINNYHHAHDAYLNAVVGTALIKKYPKLESEFVYGDYKVYDVRKMIAKSEQEIGKATAKYFFYSNIMNFFKTEITLANGEIRKRPLIETNGETGEIVWDKGRDFATVRKVLSMPQVNIVKKTEVQTGGFSKESILPKRNSDKLIARKKDWDPKKYGGFDSPTVAYSVLVVAKVEKGKSKKLKSVKELLGITIMERSSFEKNPIDFLEAKGYKEVKKDLIIKLPKYSLFELENGRKRMLASAGELQKGNELALPSKYVNFLYLASHYEKLKGSPEDNEQKQLFVEQHKHYLDEIIEQISEFSKRVILADANLDKVLSAYNKHRDKPIREQAENIIHLFTLTNLGAPAAFKYFDTTIDRKRYTSTKEVLDATLIHQSITGLYETRIDLSQLGGDGSGSPKKKRKVDGSPKKKRKVDSG

SEQ ID NO: 858 - protein, 1593 aa, synthetic construct
  REGION 1..1593: note = Synthetic
MEASPASGPRHLMDPHIFTSNFNNGIGRHKTYLCYEVERLDNGTSVKMDQHRGFLHNQAKNLLCGFYGRHAELRFLDLVPSLQLDPAQIYRVTWFISWSPCFSWGCAGEVRAFLQENTHVRLRIFAARIYDYDPLYKEALQMLRDAGAQVSIMTYDEFKHCWDTFVDHQGCPFQPWDGLDEHSQALSGRLRAILQNQGNGTKDSTKDIPETPSKDDKKYSIGLAIGTNSVGWAVITDEYKVPSKKFKVLGNTDRHSIKKNLIGALLFDSGETAEATRLKRTARRRYTRRKNRICYLQEIFSNEMAKVDDSFFHRLEESFLVEEDKKHERHPIFGNIVDEVAYHEKYPTIYHLRKKLVDSTDKADLRLIYLALAHMIKFRGHFLIEGDLNPDNSDVDKLFIQLVQTYNQLFEENPINASGVDAKAILSARLSKSRRLENLIAQLPGEKKNGLFGNLIALSLGLTPNFKSNFDLAEDAKLQLSKDTYDDDLDNLLAQIGDQYADLFLAAKNLSDAILLSDILRVNTEITKAPLSASMIKRYDEHHQDLTLLKALVRQQLPEKYKEIFFDQSKNGYAGYIDGGASQEEFYKFIKPILEKMDGTEELLVKLNREDLLRKQRTFDNGSIPHQIHLGELHAILRRQEDFYPFLKDNREKIEKILTFRIPYYVGPLARGNSRFAWMTRKSEETITPWNFEEVVDKGASAQSFIERMTNFDKNLPNEKVLPKHSLLYEYFTVYNELTKVKYVTEGMRKPAFLSGEQKKAIVDLLFKTNRKVTVKQLKEDYFKKIECFDSVEISGVEDRFNASLGTYHDLLKIIKDKDFLDNEENEDILEDIVLTLTLFEDREMIEERLKTYAHLFDDKVMKQLKRRRYTGWGRLSRKLINGIRDKQSGKTILDFLKSDGFANRNFMQLIHDDSLTFKEDIQKAQVSGQGDSLHEHIANLAGSPAIKKGILQTVKVVDELVKVMGRHKPENIVIEMARENQTTQKGQKNSRERMKRIEEGIKELGSQILKEHPVENTQLQNEKLYLYYLQNGRDMYVDQELDINRLSDYDVDHIVPQSFLKDDSIDNKVLTRSDKNRGKSDNVPSEEVVKKMKNYWRQLLNAKLITQRKFDNLTKAERGGLSELDKAGFIKRQLVETRQITKHVAQILDSRMNTKYDENDKLIREVKVITLKSKLVSDFRKDFQFYKVREINNYHHAHDAYLNAVVGTALIKKYPKLESEFVYGDYKVYDVRKMIAKSEQEIGKATAKYFFYSNIMNFFKTEITLANGEIRKRPLIETNGETGEIVWDKGRDFATVRKVLSMPQVNIVKKTEVQTGGFSKESILPKRNSDKLIARKKDWDPKKYGGFDSPTVAYSVLVVAKVEKGKSKKLKSVKELLGITIMERSSFEKNPIDFLEAKGYKEVKKDLIIKLPKYSLFELENGRKRMLASAGELQKGNELALPSKYVNFLYLASHYEKLKGSPEDNEQKQLFVEQHKHYLDEIIEQISEFSKRVILADANLDKVLSAYNKHRDKPIREQAENIIHLFTLTNLGAPAAFKYFDTTIDRKRYTSTKEVLDATLIHQSITGLYETRIDLSQLGGDGGGSPKKKRKV

SEQ ID NO: 859 - protein, 107 aa, synthetic construct
  REGION 1..107: note = Synthetic
MTNLSDIIEKETGKQLVIQESILMLPEEVEEVIGNKPESDILVHTAYDESTDENVMLLTSDAPEYKPWALVIQDSNGENKIKMLSGGSKRTADGSEFESPKKKRKVE

SEQ ID NO: 860 - protein, 126 aa, synthetic construct
  REGION 1..126: note = Synthetic
MTNLSDIIEKETGKQLVIQESILMLPEEVEEVIGNKPESDILVHTAYDESTDENVMLLTSDAPEYKPWALVIQDSNGENKIKMLSGGSKRTADGSEFESPKKKRKVESESATPESVSGWRLFKKIS

SEQ ID NO: 861-900 - skipped (40 entries)

SEQ ID NO: 901 - protein, 16 aa, synthetic construct
  REGION 1..16: note = Synthetic
SGSETPGTSESATPES

SEQ ID NO: 902 - protein, 12 aa, synthetic construct
  REGION 1..12: note = Synthetic
SGSETPGTSESA

SEQ ID NO: 903 - protein, 21 aa, synthetic construct
  REGION 1..21: note = Synthetic
SGSETPGTSESATPEGGSGGS

SEQ ID NO: 904 - protein, 15 aa, synthetic construct
  REGION 1..15: note = Synthetic
GGGGSEAAAKEAAAK

SEQ ID NO: 905 - protein, 15 aa, synthetic construct
  REGION 1..15: note = Synthetic
EAAAKGGGGSGGGGS

SEQ ID NO: 906 - protein, 15 aa, synthetic construct
  REGION 1..15: note = Synthetic
EAAAKEAAAKEAAAK

SEQ ID NO: 907 - protein, 20 aa, synthetic construct
  REGION 1..20: note = Synthetic
GGGGSGGGGSGGGGSGGGGS

SEQ ID NO: 908 - protein, 20 aa, synthetic construct
  REGION 1..20: note = Synthetic
GGGGSGGGGSEAAAKEAAAK

SEQ ID NO: 909 - protein, 20 aa, synthetic construct
  REGION 1..20: note = Synthetic
GGGGSEAAAKGGGGSGGGGS

SEQ ID NO: 910 - protein, 25 aa, synthetic construct
  REGION 1..25: note = Synthetic
EAAAKEAAAKEAAAKGGGGSGGGGS

SEQ ID NO: 911 - protein, 20 aa, synthetic construct
  REGION 1..20: note = Synthetic
EAAAKEAAAKEAAAKEAAAK

SEQ ID NO: 912 - protein, 25 aa, synthetic construct
  REGION 1..25: note = Synthetic
GGGGSEAAAKEAAAKGGGGSEAAAK

SEQ ID NO: 913 - protein, 25 aa, synthetic construct
  REGION 1..25: note = Synthetic
EAAAKEAAAKGGGGSGGGGSGGGGS

SEQ ID NO: 914 - protein, 25 aa, synthetic construct
  REGION 1..25: note = Synthetic
EAAAKEAAAKGGGGSGGGGSEAAAK

SEQ ID NO: 915 - protein, 4 aa, synthetic construct
  REGION 1..4: note = Synthetic
SGGS

SEQ ID NO: 916 - protein, 7 aa, synthetic construct
  REGION 1..7: note = Synthetic
PKKKRKV

SEQ ID NO: 917 - protein, 9 aa, synthetic construct
  REGION 1..9: note = Synthetic
LAAKRSRTT

SEQ ID NO: 918 - protein, 9 aa, synthetic construct
  REGION 1..9: note = Synthetic
QAAKRSRTT

SEQ ID NO: 919 - protein, 10 aa, synthetic construct
  REGION 1..10: note = Synthetic
PAPAKRERTT

SEQ ID NO: 920 - protein, 9 aa, synthetic construct
  REGION 1..9: note = Synthetic
QAAKRPRTT

SEQ ID NO: 921 - protein, 9 aa, synthetic construct
  REGION 1..9: note = Synthetic
RAAKRPRTT

SEQ ID NO: 922 - protein, 11 aa, synthetic construct
  REGION 1..11: note = Synthetic
AAAKRSWSMAA

SEQ ID NO: 923 - protein, 11 aa, synthetic construct
  REGION 1..11: note = Synthetic
AAAKRVWSMAF

SEQ ID NO: 924 - protein, 11 aa, synthetic construct
  REGION 1..11: note = Synthetic
AAAKRSWSMAF

SEQ ID NO: 925 - protein, 10 aa, synthetic construct
  REGION 1..10: note = Synthetic
AAAKRKYFAA

SEQ ID NO: 926 - protein, 10 aa, synthetic construct
  REGION 1..10: note = Synthetic
RAAKRKAFAA

SEQ ID NO: 927 - protein, 10 aa, synthetic construct
  REGION 1..10: note = Synthetic
RAAKRKYFAV

SEQ ID NO: 928 - protein, 7 aa, synthetic construct
  REGION 1..7: note = Synthetic
PKKKRRV

SEQ ID NO: 929 - protein, 16 aa, synthetic construct
  REGION 1..16: note = Synthetic
KRPAATKKAGQAKKKK

SEQ ID NO: 930 - skipped

SEQ ID NO: 931 - protein, 5 aa, synthetic construct
  REGION 1..5: note = Synthetic
GGGGS

SEQ ID NO: 932 - protein, 5 aa, synthetic construct
  REGION 1..5: note = Synthetic
EAAAK

SEQ ID NO: 933 - protein, 5 aa, synthetic construct
  REGION 1..5: note = Synthetic
SEGSA

SEQ ID NO: 934 - protein, 9 aa, synthetic construct
  REGION 1..9: note = Synthetic
SEGSAGTST

SEQ ID NO: 935 - protein, 10 aa, synthetic construct
  REGION 1..10: note = Synthetic
GGGGSGGGGS

SEQ ID NO: 936 - protein, 10 aa, synthetic construct
  REGION 1..10: note = Synthetic
GGGGSEAAAK

SEQ ID NO: 937 - protein, 10 aa, synthetic construct
  REGION 1..10: note = Synthetic
EAAAKGGGGS

SEQ ID NO: 938 - protein, 10 aa, synthetic construct
  REGION 1..10: note = Synthetic
EAAAKEAAAK

SEQ ID NO: 939 - protein, 15 aa, synthetic construct
  REGION 1..15: note = Synthetic
SEGSAGTSTESEGSA

SEQ ID NO: 940 - protein, 15 aa, synthetic construct
  REGION 1..15: note = Synthetic
GGGGSGGGGSGGGGS

SEQ ID NO: 941 - protein, 15 aa, synthetic construct
  REGION 1..15: note = Synthetic
GGGGSGGGGSEAAAK

SEQ ID NO: 942 - protein, 15 aa, synthetic construct
  REGION 1..15: note = Synthetic
GGGGSEAAAKGGGGS

SEQ ID NO: 943 - protein, 15 aa, synthetic construct
  REGION 1..15: note = Synthetic
EAAAKGGGGSEAAAK

SEQ ID NO: 944 - protein, 15 aa, synthetic construct
  REGION 1..15: note = Synthetic
EAAAKEAAAKGGGGS

SEQ ID NO: 945 - protein, 20 aa, synthetic construct
  REGION 1..20: note = Synthetic
SEGSAGTSTESEGSAGTSTE

SEQ ID NO: 946 - protein, 20 aa, synthetic construct
  REGION 1..20: note = Synthetic
GGGGSGGGGSGGGGSEAAAK

SEQ ID NO: 947 - protein, 20 aa, synthetic construct
  REGION 1..20: note = Synthetic
GGGGSGGGGSEAAAKGGGGS

SEQ ID NO: 948 - protein, 20 aa, synthetic construct
  REGION 1..20: note = Synthetic
GGGGSEAAAKGGGGSEAAAK

SEQ ID NO: 949 - protein, 20 aa, synthetic construct
  REGION 1..20: note = Synthetic
GGGGSEAAAKEAAAKGGGGS

SEQ ID NO: 950 - protein, 20 aa, synthetic construct
  REGION 1..20: note = Synthetic
GGGGSEAAAKEAAAKEAAAK

SEQ ID NO: 951 - protein, 20 aa, synthetic construct
  REGION 1..20: note = Synthetic
EAAAKGGGGSGGGGSGGGGS

SEQ ID NO: 952 - protein, 20 aa, synthetic construct
  REGION 1..20: note = Synthetic
EAAAKGGGGSGGGGSEAAAK

SEQ ID NO: 953 - protein, 20 aa, synthetic construct
  REGION 1..20: note = Synthetic
EAAAKGGGGSEAAAKGGGGS

SEQ ID NO: 954 - protein, 20 aa, synthetic construct
  REGION 1..20: note = Synthetic
EAAAKGGGGSEAAAKEAAAK

SEQ ID NO: 955 - protein, 20 aa, synthetic construct
  REGION 1..20: note = Synthetic
EAAAKEAAAKGGGGSGGGGS

SEQ ID NO: 956 - protein, 20 aa, synthetic construct
  REGION 1..20: note = Synthetic
EAAAKEAAAKGGGGSEAAAK

SEQ ID NO: 957 - protein, 20 aa, synthetic construct
  REGION 1..20: note = Synthetic
EAAAKEAAAKEAAAKGGGGS

SEQ ID NO: 958 - protein, 25 aa, synthetic construct
  REGION 1..25: note = Synthetic
SEGSAGTSTESEGSAGTSTESEGSA

SEQ ID NO: 959 - protein, 25 aa, synthetic construct
  REGION 1..25: note = Synthetic
GGGGSGGGGSGGGGSGGGGSGGGGS

SEQ ID NO: 960 - protein, 25 aa, synthetic construct
  REGION 1..25: note = Synthetic
GGGGSGGGGSGGGGSGGGGSEAAAK

SEQ ID NO: 961 - protein, 25 aa, synthetic construct
  REGION 1..25: note = Synthetic
GGGGSGGGGSGGGGSEAAAKGGGGS

SEQ ID NO: 962 - protein, 25 aa, synthetic construct
  REGION 1..25: note = Synthetic
GGGGSGGGGSGGGGSEAAAKEAAAK

SEQ ID NO: 963 - protein, 25 aa, synthetic construct
  REGION 1..25: note = Synthetic
GGGGSGGGGSEAAAKGGGGSGGGGS

SEQ ID NO: 964 - protein, 25 aa, synthetic construct
  REGION 1..25: note = Synthetic
GGGGSGGGGSEAAAKGGGGSEAAAK

SEQ ID NO: 965 - protein, 25 aa, synthetic construct
  REGION 1..25: note = Synthetic
GGGGSGGGGSEAAAKEAAAKGGGGS

SEQ ID NO: 966 - protein, 25 aa, synthetic construct
  REGION 1..25: note = Synthetic
GGGGSGGGGSEAAAKEAAAKEAAAK

SEQ ID NO: 967 - protein, 25 aa, synthetic construct
  REGION 1..25: note = Synthetic
GGGGSEAAAKGGGGSGGGGSGGGGS

SEQ ID NO: 968 - protein, 25 aa, synthetic construct
  REGION 1..25: note = Synthetic
GGGGSEAAAKGGGGSGGGGSEAAAK

SEQ ID NO: 969 - protein, 25 aa, synthetic construct
  REGION 1..25: note = Synthetic
GGGGSEAAAKGGGGSEAAAKGGGGS

SEQ ID NO: 970 - protein, 25 aa, synthetic construct
  REGION 1..25: note = Synthetic
GGGGSEAAAKGGGGSEAAAKEAAAK

SEQ ID NO: 971 - protein, 25 aa, synthetic construct
  REGION 1..25: note = Synthetic
GGGGSEAAAKEAAAKGGGGSGGGGS

SEQ ID NO: 972 - protein, 25 aa, synthetic construct
  REGION 1..25: note = Synthetic
GGGGSEAAAKEAAAKEAAAKGGGGS

SEQ ID NO: 973 - protein, 25 aa, synthetic construct
  REGION 1..25: note = Synthetic
GGGGSEAAAKEAAAKEAAAKEAAAK

SEQ ID NO: 974 - protein, 25 aa, synthetic construct
  REGION 1..25: note = Synthetic
EAAAKGGGGSGGGGSGGGGSGGGGS

SEQ ID NO: 975 - protein, 25 aa, synthetic construct
  REGION 1..25: note = Synthetic
EAAAKGGGGSGGGGSGGGGSEAAAK

SEQ ID NO: 976 - protein, 25 aa, synthetic construct
  REGION 1..25: note = Synthetic
EAAAKGGGGSGGGGSEAAAKGGGGS

SEQ ID NO: 977 - protein, 25 aa, synthetic construct
  REGION 1..25: note = Synthetic
EAAAKGGGGSGGGGSEAAAKEAAAK

SEQ ID NO: 978 - protein, 25 aa, synthetic construct
  REGION 1..25: note = Synthetic
EAAAKGGGGSEAAAKGGGGSGGGGS

SEQ ID NO: 979 - protein, 25 aa, synthetic construct
  REGION 1..25: note = Synthetic
EAAAKGGGGSEAAAKGGGGSEAAAK

SEQ ID NO: 980 - protein, 25 aa, synthetic construct
  REGION 1..25: note = Synthetic
EAAAKGGGGSEAAAKEAAAKGGGGS

SEQ ID NO: 981 - protein, 25 aa, synthetic construct
  REGION 1..25: note = Synthetic
EAAAKGGGGSEAAAKEAAAKEAAAK

SEQ ID NO: 982 - protein, 25 aa, synthetic construct
  REGION 1..25: note = Synthetic
EAAAKEAAAKGGGGSEAAAKGGGGS

SEQ ID NO: 983 - protein, 25 aa, synthetic construct
  REGION 1..25: note = Synthetic
EAAAKEAAAKGGGGSEAAAKEAAAK

SEQ ID NO: 984 - protein, 25 aa, synthetic construct
  REGION 1..25: note = Synthetic
EAAAKEAAAKEAAAKGGGGSEAAAK

SEQ ID NO: 985 - protein, 25 aa, synthetic construct
  REGION 1..25: note = Synthetic
EAAAKEAAAKEAAAKEAAAKGGGGS

SEQ ID NO: 986 - protein, 25 aa, synthetic construct
  REGION 1..25: note = Synthetic
EAAAKEAAAKEAAAKEAAAKEAAAK

SEQ ID NO: 987 - protein, 16 aa, synthetic construct
  REGION 1..16: note = Synthetic
GTKDSTKDIPETPSKD

SEQ ID NO: 988 - protein, 16 aa, synthetic construct
  REGION 1..16: note = Synthetic
GRDVRQPEVKEEKPES

SEQ ID NO: 989 - protein, 16 aa, synthetic construct
  REGION 1..16: note = Synthetic
EGKSSGSGSESKSTAG

SEQ ID NO: 990 - protein, 16 aa, synthetic construct
  REGION 1..16: note = Synthetic
TPGSPAGSPTSTEEGT

SEQ ID NO: 991 - protein, 16 aa, synthetic construct
  REGION 1..16: note = Synthetic
GSEPATSGSETPGTST

SEQ ID NO: 992 - RNA, 100 nt, synthetic construct
  misc_feature 1..100: note = Synthetic
  modified_base 1: mod_base = OTHER; note = 2'-O-methyl nucleotide, phosphorothioate linkage
  modified_base 2: mod_base = OTHER; note = 2'-O-methyl nucleotide, phosphorothioate linkage
  modified_base 3: mod_base = OTHER; note = 2'-O-methyl nucleotide, phosphorothioate linkage
  modified_base 29: mod_base = OTHER; note = 2'-O-methyl nucleotide
  modified_base 30: mod_base = OTHER; note = 2'-O-methyl nucleotide
  modified_base 31: mod_base = OTHER; note = 2'-O-methyl nucleotide
  modified_base 32: mod_base = OTHER; note = 2'-O-methyl nucleotide
  modified_base 33: mod_base = OTHER; note = 2'-O-methyl nucleotide
  modified_base 34: mod_base = OTHER; note = 2'-O-methyl nucleotide
  modified_base 35: mod_base = OTHER; note = 2'-O-methyl nucleotide
  modified_base 36: mod_base = OTHER; note = 2'-O-methyl nucleotide
  modified_base 37: mod_base = OTHER; note = 2'-O-methyl nucleotide
  modified_base 38: mod_base = OTHER; note = 2'-O-methyl nucleotide
  modified_base 39: mod_base = OTHER; note = 2'-O-methyl nucleotide
  modified_base 40: mod_base = OTHER; note = 2'-O-methyl nucleotide
  modified_base 69: mod_base = OTHER; note = 2'-O-methyl nucleotide
  modified_base 70: mod_base = OTHER; note = 2'-O-methyl nucleotide
  modified_base 71: mod_base = OTHER; note = 2'-O-methyl nucleotide
  modified_base 72: mod_base = OTHER; note = 2'-O-methyl nucleotide
  modified_base 73: mod_base = OTHER; note = 2'-O-methyl nucleotide
  modified_base 74: mod_base = OTHER; note = 2'-O-methyl nucleotide
  modified_base 75: mod_base = OTHER; note = 2'-O-methyl nucleotide
  modified_base 76: mod_base = OTHER; note = 2'-O-methyl nucleotide
  modified_base 77: mod_base = OTHER; note = 2'-O-methyl nucleotide
  modified_base 78: mod_base = OTHER; note = 2'-O-methyl nucleotide
  modified_base 79: mod_base = OTHER; note = 2'-O-methyl nucleotide
  modified_base 80: mod_base = OTHER; note = 2'-O-methyl nucleotide
  modified_base 81: mod_base = OTHER; note = 2'-O-methyl nucleotide
  modified_base 82: mod_base = OTHER; note = 2'-O-methyl nucleotide
  modified_base 83: mod_base = OTHER; note = 2'-O-methyl nucleotide
  modified_base 84: mod_base = OTHER; note = 2'-O-methyl nucleotide
  modified_base 85: mod_base = OTHER; note = 2'-O-methyl nucleotide
  modified_base 86: mod_base = OTHER; note = 2'-O-methyl nucleotide
  modified_base 87: mod_base = OTHER; note = 2'-O-methyl nucleotide
  modified_base 88: mod_base = OTHER; note = 2'-O-methyl nucleotide
  modified_base 89: mod_base = OTHER; note = 2'-O-methyl nucleotide
  modified_base 90: mod_base = OTHER; note = 2'-O-methyl nucleotide
  modified_base 91: mod_base = OTHER; note = 2'-O-methyl nucleotide
  modified_base 92: mod_base = OTHER; note = 2'-O-methyl nucleotide
  modified_base 93: mod_base = OTHER; note = 2'-O-methyl nucleotide
  modified_base 94: mod_base = OTHER; note = 2'-O-methyl nucleotide
  modified_base 95: mod_base = OTHER; note = 2'-O-methyl nucleotide
  modified_base 96: mod_base = OTHER; note = 2'-O-methyl nucleotide
  modified_base 97: mod_base = OTHER; note = 2'-O-methyl nucleotide, phosphorothioate linkage
  modified_base 98: mod_base = OTHER; note = 2'-O-methyl nucleotide, phosphorothioate linkage
  modified_base 99: mod_base = OTHER; note = 2'-O-methyl nucleotide, phosphorothioate linkage
  modified_base 100: mod_base = OTHER; note = 2'-O-methyl nucleotide
  source 1..100: mol_type = other RNA
gagtccgagcagaagaagaagttttagagctagaaatagcaagttaaaataaggctagtccgttatcaacttgaaaaagtggcaccgagtcggtgctttt

SEQ ID NO: 993 - RNA, 100 nt, synthetic construct
  misc_feature 1..100: note = Synthetic
  modified_base 1: mod_base = OTHER; note = 2'-O-methyl nucleotide, phosphorothioate linkage
  modified_base 2: mod_base = OTHER; note = 2'-O-methyl nucleotide, phosphorothioate linkage
  modified_base 3: mod_base = OTHER; note = 2'-O-methyl nucleotide, phosphorothioate linkage
  modified_base 29: mod_base = OTHER; note = 2'-O-methyl nucleotide
  modified_base 30: mod_base = OTHER; note = 2'-O-methyl nucleotide
  modified_base 31: mod_base = OTHER; note = 2'-O-methyl nucleotide
  modified_base 32: mod_base = OTHER; note = 2'-O-methyl nucleotide
  modified_base 33: mod_base = OTHER; note = 2'-O-methyl nucleotide
  modified_base 34: mod_base = OTHER; note = 2'-O-methyl nucleotide
  modified_base 35: mod_base = OTHER; note = 2'-O-methyl nucleotide
  modified_base 36: mod_base = OTHER; note = 2'-O-methyl nucleotide
  modified_base 37: mod_base = OTHER; note = 2'-O-methyl nucleotide
  modified_base 38: mod_base = OTHER; note = 2'-O-methyl nucleotide
  modified_base 39: mod_base = OTHER; note = 2'-O-methyl nucleotide
  modified_base 40: mod_base = OTHER; note = 2'-O-methyl nucleotide
  modified_base 69: mod_base = OTHER; note = 2'-O-methyl nucleotide
  modified_base 70: mod_base = OTHER; note = 2'-O-methyl nucleotide
  modified_base 71: mod_base = OTHER; note = 2'-O-methyl nucleotide
  modified_base 72: mod_base = OTHER; note = 2'-O-methyl nucleotide
  modified_base 73: mod_base = OTHER; note = 2'-O-methyl nucleotide
  modified_base 74: mod_base = OTHER; note = 2'-O-methyl nucleotide
  modified_base 75: mod_base = OTHER; note = 2'-O-methyl nucleotide
  modified_base 76: mod_base = OTHER; note = 2'-O-methyl nucleotide
  modified_base 77: mod_base = OTHER; note = 2'-O-methyl nucleotide
  modified_base 78: mod_base = OTHER; note = 2'-O-methyl nucleotide
  modified_base 79: mod_base = OTHER; note = 2'-O-methyl nucleotide
  modified_base 80: mod_base = OTHER; note = 2'-O-methyl nucleotide
  modified_base 81: mod_base = OTHER; note = 2'-O-methyl nucleotide
  modified_base 82: mod_base = OTHER; note = 2'-O-methyl nucleotide
  modified_base 83: mod_base = OTHER; note = 2'-O-methyl nucleotide
  modified_base 84: mod_base = OTHER; note = 2'-O-methyl nucleotide
  modified_base 85: mod_base = OTHER; note = 2'-O-methyl nucleotide
  modified_base 86: mod_base = OTHER; note = 2'-O-methyl nucleotide
  modified_base 87: mod_base = OTHER; note = 2'-O-methyl nucleotide
  modified_base 88: mod_base = OTHER; note = 2'-O-methyl nucleotide
  modified_base 89: mod_base = OTHER; note = 2'-O-methyl nucleotide
  modified_base 90: mod_base = OTHER; note = 2'-O-methyl nucleotide
  modified_base 91: mod_base = OTHER; note = 2'-O-methyl nucleotide
  modified_base 92: mod_base = OTHER; note = 2'-O-methyl nucleotide
  modified_base 93: mod_base = OTHER; note = 2'-O-methyl nucleotide
  modified_base 94: mod_base = OTHER; note = 2'-O-methyl nucleotide
  modified_base 95: mod_base = OTHER; note = 2'-O-methyl nucleotide
  modified_base 96: mod_base = OTHER; note = 2'-O-methyl nucleotide
  modified_base 97: mod_base = OTHER; note = 2'-O-methyl nucleotide, phosphorothioate linkage
  modified_base 98: mod_base = OTHER; note = 2'-O-methyl nucleotide, phosphorothioate linkage
  modified_base 99: mod_base = OTHER; note = 2'-O-methyl nucleotide, phosphorothioate linkage
  modified_base 100: mod_base = OTHER; note = 2'-O-methyl nucleotide
  source 1..100: mol_type = other RNA
gaccccctccaccccgcctcgttttagagctagaaatagcaagttaaaataaggctagtccgttatcaacttgaaaaagtggcaccgagtcggtgctttt

SEQ ID NO: 994 - RNA, 91 nt, synthetic construct
  misc_feature 1..91: note = Synthetic
  modified_base 1: mod_base = OTHER; note = 2'-O-methyl nucleotide, phosphorothioate linkage
  modified_base 2: mod_base = OTHER; note = 2'-O-methyl nucleotide, phosphorothioate linkage
  modified_base 3: mod_base = OTHER; note = 2'-O-methyl nucleotide, phosphorothioate linkage
  modified_base 29: mod_base = OTHER; note = 2'-O-methyl nucleotide
  modified_base 30: mod_base = OTHER; note = 2'-O-methyl nucleotide
  modified_base 31: mod_base = OTHER; note = 2'-O-methyl nucleotide
  modified_base 32: mod_base = OTHER; note = 2'-O-methyl nucleotide
  modified_base 33: mod_base = OTHER; note = 2'-O-methyl nucleotide
  modified_base 34: mod_base = OTHER; note = 2'-O-methyl nucleotide
  modified_base 35: mod_base = OTHER; note = 2'-O-methyl nucleotide
  modified_base 36: mod_base = OTHER; note = 2'-O-methyl nucleotide
  modified_base 37: mod_base = OTHER; note = 2'-O-methyl nucleotide
  modified_base 38: mod_base = OTHER; note = 2'-O-methyl nucleotide
  modified_base 39: mod_base = OTHER; note = 2'-O-methyl nucleotide
  modified_base 40: mod_base = OTHER; note = 2'-O-methyl nucleotide
  modified_base 88: mod_base = OTHER; note = 2'-O-methyl nucleotide, phosphorothioate linkage
  modified_base 89: mod_base = OTHER; note = 2'-O-methyl nucleotide, phosphorothioate linkage
  modified_base 90: mod_base = OTHER; note = 2'-O-methyl nucleotide, phosphorothioate linkage
  modified_base 91: mod_base = OTHER; note = 2'-O-methyl nucleotide
  source 1..91: mol_type = other RNA
tcgctttgctgaggtctatagttttagagctagaaatagcaagttaaaataaggctagtccgttatcacgaaagggcaccgagtcggtgct

SEQ ID NO: 995 - skipped

SEQ ID NO: 996 - protein, 496 aa, synthetic construct
  REGION 1..496: note = Synthetic
MALPVTALLLPLALLLHAARPEVQLLESGGGLVQPGGSLRLSCAASGFTFSIYAMSWVRQAPGKGLEWVSAISDSGGRTYFADSVRGRFTISRDNSKNTLSLQMNSLRAEDTAVYYCAKVDYSNYLFFDYWGQGTLVTVSSGGGGSGGGGSGGGGSEIVLTQSPGTLSLSPGERATLSCRASQSISSSYLAWYQQKPGQAPRLLIYGASSRATGIPDRFSGSGSGTDFTLTISRLEPEDFAVYYCQQYGSSPYTFGQGTKLEIKGSTTTPAPRPPTPAPTIASQPLSLRPEACRPAAGGAVHTRGLDFACDKDPKFWVLVVVGGVLACYSLLVTVAFIIFWVRSKRSRLLHSDYMNMTPRRPGPTRKHYQPYAPPRDFAAYRSRVKFSRSADAPAYQQGQNQLYNELNLGRREEYDVLDKRRGRDPEMGGKPQRRKNPQEGLYNELQKDKMAEAYSEIGMKGERRRGKGHDGLYQGLSTATKDTYDALHMQALPPR

SEQ ID NO: 997 - protein, 489 aa, synthetic construct
  REGION 1..489: note = Synthetic
MALPVTALLLPLALLLHAARPEVQLLESGGGLVQPGGSLRLSCAASGFTFSIYAMSWVRQAPGKGLEWVSAISDSGGRTYFADSVRGRFTISRDNSKNTLSLQMNSLRAEDTAVYYCAKVDYSNYLFFDYWGQGTLVTVSSGGGGSGGGGSGGGGSEIVLTQSPGTLSLSPGERATLSCRASQSISSSYLAWYQQKPGQAPRLLIYGASSRATGIPDRFSGSGSGTDFTLTISRLEPEDFAVYYCQQYGSSPYTFGQGTKLEIKGSTTTPAPRPPTPAPTIASQPLSLRPEACRPAAGGAVHTRGLDFACDIYIWAPLAGTCGVLLLSLVITLYCKRGRKKLLYIFKQPFMRPVQTTQEEDGCSCRFPEEEEGGCELRVKFSRSADAPAYQQGQNQLYNELNLGRREEYDVLDKRRGRDPEMGGKPRRKNPQEGLYNELQKDKMAEAYSEIGMKGERRRGKGHDGLYQGLSTATKDTYDALHMQALPPR

SEQ ID NO: 998 - protein, 495 aa, synthetic construct
  REGION 1..495: note = Synthetic
MALPVTALLLPLALLLHAARPQVQLVQSGAEVKKPGSSVKVSCKASGYSFSDYYMNWVRQAPGQGLEWMGEINPTTGGATYNQKFKARVTITADESTSTAYMELSSLRSEDTAVYYCARSLFPANYAGFVYWGQGTLVTVSSGGGGSGGGGSGGGGSDIQMTQSPSSLSASVGDRVTITCSASSSVSYMYWYQQKPGKAPKLLIYDTSKLASGVPSRFSGSGSGTDYTFTISSLQPEDIATYYCQQWSSYPWTFGQGTKVEIKGSTTTPAPRPPTPAPTIASQPLSLRPEACRPAAGGAVHTRGLDFACDKDPKFWVLVVVGGVLACYSLLVTVAFIIFWVRSKRSRLLHSDYMNMTPRRPGPTRKHYQPYAPPRDFAAYRSRVKFSRSADAPAYQQGQNQLYNELNLGRREEYDVLDKRRGRDPEMGGKPQRRKNPQEGLYNELQKDKMAEAYSEIGMKGERRRGKGHDGLYQGLSTATKDTYDALHMQALPPR

SEQ ID NO: 999 - protein, 488 aa, synthetic construct
  REGION 1..488: note = Synthetic
MALPVTALLLPLALLLHAARPQVQLVQSGAEVKKPGSSVKVSCKASGYSFSDYYMNWVRQAPGQGLEWMGEINPTTGGATYNQKFKARVTITADESTSTAYMELSSLRSEDTAVYYCARSLFPANYAGFVYWGQGTLVTVSSGGGGSGGGGSGGGGSDIQMTQSPSSLSASVGDRVTITCSASSSVSYMYWYQQKPGKAPKLLIYDTSKLASGVPSRFSGSGSGTDYTFTISSLQPEDIATYYCQQWSSYPWTFGQGTKVEIKGSTTTPAPRPPTPAPTIASQPLSLRPEACRPAAGGAVHTRGLDFACDIYIWAPLAGTCGVLLLSLVITLYCKRGRKKLLYIFKQPFMRPVQTTQEEDGCSCRFPEEEEGGCELRVKFSRSADAPAYQQGQNQLYNELNLGRREEYDVLDKRRGRDPEMGGKPRRKNPQEGLYNELQKDKMAEAYSEIGMKGERRRGKGHDGLYQGLSTATKDTYDALHMQALPPR

SEQ ID NO: 1000 - protein, 486 aa, synthetic construct
  REGION 1..486: note = Synthetic
MALPVTALLLPLALLLHAARPQVQLVESGGGVVQPGRSLRLSCAASGFTFSDHGMHWVRQAPGKGLEWVAVIWYDGSNKYYADSVKGRFTISRDNSKNTLYLQMNSLRAEDTAVYYCARDSIMVRGDYWGQGTLVTVSSGGGGSGGGGSGGGGSDIQMTQSPSSLSASVGDRVTITCRASQGISSWLAWYQQKPEKAPKSLIYAASSLQSGVPSRFSGSGSGTDFTLTISSLQPEDFATYYCQQYNSYPLTFGGGTKVEIKGSTTTPAPRPPTPAPTIASQPLSLRPEACRPAAGGAVHTRGLDFACDIYIWAPLAGTCGVLLLSLVITLYCKRGRKKLLYIFKQPFMRPVQTTQEEDGCSCRFPEEEEGGCELRVKFSRSADAPAYQQGQNQLYNELNLGRREEYDVLDKRRGRDPEMGGKPRRKNPQEGLYNELQKDKMAEAYSEIGMKGERRRGKGHDGLYQGLSTATKDTYDALHMQALPPR

SEQ ID NO: 1001 - protein, 494 aa, synthetic construct
  REGION 1..494: note = Synthetic
MALPVTALLLPLALLLHAARPQVTLKESGPVLVKPTETLTLTCTVSGFSLSNARMGVTWIRQPPGKALEWLAHIFSNDEKSYSTSLKSRLTISKDTSKTQVVLTMTNMDPVDTATYYCARIRDYYDISSYYDYWGQGTLVSVSSGGGGSGGGGSGGGGSGGGGSDIQMTQSPSAMSASVGDRVTITCRASQDISNYLAWFQQKPGKVPKRLIYAASSLQSGVPSRFSGSGSGTEFTLTISSLLPEDFATYYCLQLNSFPFTFGGGTKVEINTTTPAPRPPTPAPTIASQPLSLRPEACRPAAGGAVHTRGLDFACDIYIWAPLAGTCGVLLLSLVITLYCKRGRKKLLYIFKQPFMRPVQTTQEEDGCSCRFPEEEEGGCELRVKFSRSADAPAYQQGQNQLYNELNLGRREEYDVLDKRRGRDPEMGGKPRRKNPQEGLYNELQKDKMAEAYSEIGMKGERRRGKGHDGLYQGLSTATKDTYDALHMQALPPR

SEQ ID NO: 1002 - protein, 8 aa, synthetic construct
  REGION 1..8: note = Synthetic
PKKKRKVE

SEQ ID NO: 1003 - protein, 7 aa, synthetic construct
  REGION 1..7: note = Synthetic
KKKRKVE

SEQ ID NO: 1004 - protein, 19 aa, synthetic construct
  REGION 1..19: note = Synthetic
KRTADGSEFESPKKKRKVE

SEQ ID NO: 1005 - protein, 9 aa, synthetic construct
  REGION 1..9: note = Synthetic
PAAKKKKLD

SEQ ID NO: 1006 - RNA, 100 nt, synthetic construct
  misc_feature 1..100: note = Synthetic
  modified_base 1: mod_base = OTHER; note = 2'-O-methyl nucleotide, phosphorothioate linkage
  modified_base 2: mod_base = OTHER; note = 2'-O-methyl nucleotide, phosphorothioate linkage
  modified_base 3: mod_base = OTHER; note = 2'-O-methyl nucleotide, phosphorothioate linkage
  modified_base 29: mod_base = OTHER; note = 2'-O-methyl nucleotide
  modified_base 30: mod_base = OTHER; note = 2'-O-methyl nucleotide
  modified_base 31: mod_base = OTHER; note = 2'-O-methyl nucleotide
  modified_base 32: mod_base = OTHER; note = 2'-O-methyl nucleotide
  modified_base 33: mod_base = OTHER; note = 2'-O-methyl nucleotide
  modified_base 34: mod_base = OTHER; note = 2'-O-methyl nucleotide
  modified_base 35: mod_base = OTHER; note = 2'-O-methyl nucleotide
  modified_base 36: mod_base = OTHER; note = 2'-O-methyl nucleotide
  modified_base 37: mod_base = OTHER; note = 2'-O-methyl nucleotide
  modified_base 38: mod_base = OTHER; note = 2'-O-methyl nucleotide
  modified_base 39: mod_base = OTHER; note = 2'-O-methyl nucleotide
  modified_base 40: mod_base = OTHER; note = 2'-O-methyl nucleotide
  modified_base 69: mod_base = OTHER; note = 2'-O-methyl nucleotide
  modified_base 70: mod_base = OTHER; note = 2'-O-methyl nucleotide
  modified_base 71: mod_base = OTHER; note = 2'-O-methyl nucleotide
  modified_base 72: mod_base = OTHER; note = 2'-O-methyl nucleotide
  modified_base 73: mod_base = OTHER; note = 2'-O-methyl nucleotide
  modified_base 74: mod_base = OTHER; note = 2'-O-methyl nucleotide
  modified_base 75: mod_base = OTHER; note = 2'-O-methyl nucleotide
  modified_base 76: mod_base = OTHER; note = 2'-O-methyl nucleotide
  modified_base 77: mod_base = OTHER; note = 2'-O-methyl nucleotide
  modified_base 78: mod_base = OTHER; note = 2'-O-methyl nucleotide
  modified_base 79: mod_base = OTHER; note = 2'-O-methyl nucleotide
  modified_base 80: mod_base = OTHER; note = 2'-O-methyl nucleotide
  modified_base 81: mod_base = OTHER; note = 2'-O-methyl nucleotide
  modified_base 82: mod_base = OTHER; note = 2'-O-methyl nucleotide
  modified_base 83: mod_base = OTHER; note = 2'-O-methyl nucleotide
  modified_base 84: mod_base = OTHER; note = 2'-O-methyl nucleotide
  modified_base 85: mod_base = OTHER; note = 2'-O-methyl nucleotide
  modified_base 86: mod_base = OTHER; note = 2'-O-methyl nucleotide
  modified_base 87: mod_base = OTHER; note = 2'-O-methyl nucleotide
  modified_base 88: mod_base = OTHER; note = 2'-O-methyl nucleotide
  modified_base 89: mod_base = OTHER; note = 2'-O-methyl nucleotide
  modified_base 90: mod_base = OTHER; note = 2'-O-methyl nucleotide
  modified_base 91: mod_base = OTHER; note = 2'-O-methyl nucleotide
  modified_base 92: mod_base = OTHER; note = 2'-O-methyl nucleotide
  modified_base 93: mod_base = OTHER; note = 2'-O-methyl nucleotide
  modified_base 94: mod_base = OTHER; note = 2'-O-methyl nucleotide
  modified_base 95: mod_base = OTHER; note = 2'-O-methyl nucleotide
  modified_base 96: mod_base = OTHER; note = 2'-O-methyl nucleotide
  modified_base 97: mod_base = OTHER; note = 2'-O-methyl nucleotide, phosphorothioate linkage
  modified_base 98: mod_base = OTHER; note = 2'-O-methyl nucleotide, phosphorothioate linkage
  modified_base 99: mod_base = OTHER; note = 2'-O-methyl nucleotide, phosphorothioate linkage
  modified_base 100: mod_base = OTHER; note = 2'-O-methyl nucleotide
  source 1..100: mol_type = other RNA
ctcaccccaagtgactcgaggttttagagctagaaatagcaagttaaaataaggctagtccgttatcaacttgaaaaagtggcaccgagtcggtgctttt

SEQ ID NO: 1007 - RNA, 100 nt, synthetic construct
  misc_feature 1..100: note = Synthetic
  modified_base 1: mod_base = OTHER; note = 2'-O-methyl nucleotide, phosphorothioate linkage
  modified_base 2: mod_base = OTHER; note = 2'-O-methyl nucleotide, phosphorothioate linkage
  modified_base 3: mod_base = OTHER; note = 2'-O-methyl nucleotide, phosphorothioate linkage
  modified_base 29: mod_base = OTHER; note = 2'-O-methyl nucleotide
  modified_base 30: mod_base = OTHER; note = 2'-O-methyl nucleotide
  modified_base 31: mod_base = OTHER; note = 2'-O-methyl nucleotide
  modified_base 32: mod_base = OTHER; note = 2'-O-methyl nucleotide
  modified_base 33: mod_base = OTHER; note = 2'-O-methyl nucleotide
  modified_base 34: mod_base = OTHER; note = 2'-O-methyl nucleotide
  modified_base 35: mod_base = OTHER; note = 2'-O-methyl nucleotide
  modified_base 36: mod_base = OTHER; note = 2'-O-methyl nucleotide
  modified_base 37: mod_base = OTHER; note = 2'-O-methyl nucleotide
  modified_base 38: mod_base = OTHER; note = 2'-O-methyl nucleotide
  modified_base 39: mod_base = OTHER; note = 2'-O-methyl nucleotide
  modified_base 40: mod_base = OTHER; note = 2'-O-methyl nucleotide
  modified_base 69: mod_base = OTHER; note = 2'-O-methyl nucleotide
  modified_base 70: mod_base = OTHER; note = 2'-O-methyl nucleotide
  modified_base 71: mod_base = OTHER; note = 2'-O-methyl nucleotide
  modified_base 72: mod_base = OTHER; note = 2'-O-methyl nucleotide
  modified_base 73: mod_base = OTHER; note = 2'-O-methyl nucleotide
  modified_base 74: mod_base = OTHER; note = 2'-O-methyl nucleotide
  modified_base 75: mod_base = OTHER; note = 2'-O-methyl nucleotide
  modified_base 76: mod_base = OTHER; note = 2'-O-methyl nucleotide
  modified_base 77: mod_base = OTHER; note = 2'-O-methyl nucleotide
  modified_base 78: mod_base = OTHER; note = 2'-O-methyl nucleotide
  modified_base 79: mod_base = OTHER; note = 2'-O-methyl nucleotide
  modified_base 80: mod_base = OTHER; note = 2'-O-methyl nucleotide
  modified_base 81: mod_base = OTHER; note = 2'-O-methyl nucleotide
  modified_base 82: mod_base = OTHER; note = 2'-O-methyl nucleotide
  modified_base 83: mod_base = OTHER; note = 2'-O-methyl nucleotide
  modified_base 84: mod_base = OTHER; note = 2'-O-methyl nucleotide
  modified_base 85: mod_base = OTHER; note = 2'-O-methyl nucleotide
  modified_base 86: mod_base = OTHER; note = 2'-O-methyl nucleotide
  modified_base 87: mod_base = OTHER; note = 2'-O-methyl nucleotide
  modified_base 88: mod_base = OTHER; note = 2'-O-methyl nucleotide
  modified_base 89: mod_base = OTHER; note = 2'-O-methyl nucleotide
  modified_base 90: mod_base = OTHER; note = 2'-O-methyl nucleotide
  modified_base 91: mod_base = OTHER; note = 2'-O-methyl nucleotide
  modified_base 92: mod_base = OTHER; note = 2'-O-methyl nucleotide
  modified_base 93: mod_base = OTHER; note = 2'-O-methyl nucleotide
  modified_base 94: mod_base = OTHER; note = 2'-O-methyl nucleotide
  modified_base 95: mod_base = OTHER; note = 2'-O-methyl nucleotide
  modified_base 96: mod_base = OTHER; note = 2'-O-methyl nucleotide
  modified_base 97: mod_base = OTHER; note = 2'-O-methyl nucleotide, phosphorothioate linkage
  modified_base 98: mod_base = OTHER; note = 2'-O-methyl nucleotide, phosphorothioate linkage
  modified_base 99: mod_base = OTHER; note = 2'-O-methyl nucleotide, phosphorothioate linkage
  modified_base 100: mod_base = OTHER; note = 2'-O-methyl nucleotide
  source 1..100: mol_type = other RNA
agcgctggatgcacaccacggttttagagctagaaatagcaagttaaaataaggctagtccgttatcaacttgaaaaagtggcaccgagtcggtgctttt

SEQ ID NO: 1008 - RNA, 100 nt, synthetic construct
  misc_feature 1..100: note = Synthetic
  modified_base 1: mod_base = OTHER; note = 2'-O-methyl nucleotide, phosphorothioate linkage
  modified_base 2: mod_base = OTHER; note = 2'-O-methyl nucleotide, phosphorothioate linkage
  modified_base 3: mod_base = OTHER; note = 2'-O-methyl nucleotide, phosphorothioate linkage
  modified_base 29: mod_base = OTHER; note = 2'-O-methyl nucleotide
  modified_base 30: mod_base = OTHER; note = 2'-O-methyl nucleotide
  modified_base 31: mod_base = OTHER; note = 2'-O-methyl nucleotide
  modified_base 32: mod_base = OTHER; note = 2'-O-methyl nucleotide
  modified_base 33: mod_base = OTHER; note = 2'-O-methyl nucleotide
  modified_base 34: mod_base = OTHER; note = 2'-O-methyl nucleotide
  modified_base 35: mod_base = OTHER; note = 2'-O-methyl nucleotide
  modified_base 36: mod_base = OTHER; note = 2'-O-methyl nucleotide
  modified_base 37: mod_base = OTHER; note = 2'-O-methyl nucleotide
  modified_base 38: mod_base = OTHER; note = 2'-O-methyl nucleotide
  modified_base 39: mod_base = OTHER; note = 2'-O-methyl nucleotide
  modified_base 40: mod_base = OTHER; note = 2'-O-methyl nucleotide
  modified_base 69: mod_base = OTHER; note = 2'-O-methyl nucleotide
  modified_base 70: mod_base = OTHER; note = 2'-O-methyl nucleotide
  modified_base 71: mod_base = OTHER; note = 2'-O-methyl nucleotide
  modified_base 72: mod_base = OTHER; note = 2'-O-methyl nucleotide
  modified_base 73: mod_base = OTHER; note = 2'-O-methyl nucleotide
  modified_base 74: mod_base = OTHER; note = 2'-O-methyl nucleotide
  modified_base 75: mod_base = OTHER; note = 2'-O-methyl nucleotide
  modified_base 76: mod_base = OTHER; note = 2'-O-methyl nucleotide
  modified_base 77: mod_base = OTHER; note = 2'-O-methyl nucleotide
  modified_base 78: mod_base = OTHER; note = 2'-O-methyl nucleotide
  modified_base 79: mod_base = OTHER; note = 2'-O-methyl nucleotide
  modified_base 80: mod_base = OTHER; note = 2'-O-methyl nucleotide
  modified_base 81: mod_base = OTHER; note = 2'-O-methyl nucleotide
  modified_base 82: mod_base = OTHER; note = 2'-O-methyl nucleotide
  modified_base 83: mod_base = OTHER; note = 2'-O-methyl nucleotide
  modified_base 84: mod_base = OTHER; note = 2'-O-methyl nucleotide
  modified_base 85: mod_base = OTHER; note = 2'-O-methyl nucleotide
  modified_base 86: mod_base = OTHER; note = 2'-O-methyl nucleotide
  modified_base 87: mod_base = OTHER; note = 2'-O-methyl nucleotide
  modified_base 88: mod_base = OTHER; note = 2'-O-methyl nucleotide
  modified_base 89: mod_base = OTHER; note = 2'-O-methyl nucleotide
  modified_base 90: mod_base = OTHER; note = 2'-O-methyl nucleotide
  modified_base 91: mod_base = OTHER; note = 2'-O-methyl nucleotide
  modified_base 92: mod_base = OTHER; note = 2'-O-methyl nucleotide
  modified_base 93: mod_base = OTHER; note = 2'-O-methyl nucleotide
  modified_base 94: mod_base = OTHER; note = 2'-O-methyl nucleotide
  modified_base 95: mod_base = OTHER; note = 2'-O-methyl nucleotide
  modified_base 96: mod_base = OTHER; note = 2'-O-methyl nucleotide
  modified_base 97: mod_base = OTHER; note = 2'-O-methyl nucleotide, phosphorothioate linkage
  modified_base 98: mod_base = OTHER; note = 2'-O-methyl nucleotide, phosphorothioate linkage
  modified_base 99: mod_base = OTHER; note = 2'-O-methyl nucleotide, phosphorothioate linkage
  modified_base 100: mod_base = OTHER; note = 2'-O-methyl nucleotide
  source 1..100: mol_type = other RNA
cagctacgtatccatcgtgagttttagagctagaaatagcaagttaaaataaggctagtccgttatcaacttgaaaaagtggcaccgagtcggtgctttt

SEQ ID NO: 1009 - RNA, 100 nt, synthetic construct
  misc_feature 1..100: note = Synthetic
  modified_base 1: mod_base = OTHER; note = 2'-O-methyl nucleotide, phosphorothioate linkage
  modified_base 2: mod_base = OTHER; note = 2'-O-methyl nucleotide, phosphorothioate linkage
  modified_base 3: mod_base = OTHER; note = 2'-O-methyl nucleotide, phosphorothioate linkage
  modified_base 29: mod_base = OTHER; note = 2'-O-methyl nucleotide
  modified_base 30: mod_base = OTHER; note = 2'-O-methyl nucleotide
  modified_base 31: mod_base = OTHER; note = 2'-O-methyl nucleotide
  modified_base 32: mod_base = OTHER; note = 2'-O-methyl nucleotide
  modified_base 33: mod_base = OTHER; note = 2'-O-methyl nucleotide
  modified_base 34: mod_base = OTHER; note = 2'-O-methyl nucleotide
  modified_base 35: mod_base = OTHER; note = 2'-O-methyl nucleotide
  modified_base 36: mod_base = OTHER; note = 2'-O-methyl nucleotide
  modified_base 37: mod_base = OTHER; note = 2'-O-methyl nucleotide
  modified_base 38: mod_base = OTHER; note = 2'-O-methyl nucleotide
  modified_base 39: mod_base = OTHER; note = 2'-O-methyl nucleotide
  modified_base 40: mod_base = OTHER; note = 2'-O-methyl nucleotide
  modified_base 69: mod_base = OTHER; note = 2'-O-methyl nucleotide
  modified_base 70: mod_base = OTHER; note = 2'-O-methyl nucleotide
  modified_base 71: mod_base = OTHER; note = 2'-O-methyl nucleotide
  modified_base 72: mod_base = OTHER; note = 2'-O-methyl nucleotide
  modified_base 73: mod_base = OTHER; note = 2'-O-methyl nucleotide
  modified_base 74: mod_base = OTHER; note = 2'-O-methyl nucleotide
  modified_base 75: mod_base = OTHER; note = 2'-O-methyl nucleotide
  modified_base 76: mod_base = OTHER; note = 2'-O-methyl nucleotide
  modified_base 77: mod_base = OTHER; note = 2'-O-methyl nucleotide
  modified_base 78: mod_base = OTHER; note = 2'-O-methyl nucleotide
  modified_base 79: mod_base = OTHER; note = 2'-O-methyl nucleotide
  modified_base 80: mod_base = OTHER; note = 2'-O-methyl nucleotide
  modified_base 81: mod_base = OTHER; note = 2'-O-methyl nucleotide
  modified_base 82: mod_base = OTHER; note = 2'-O-methyl nucleotide
  modified_base 83: mod_base = OTHER; note = 2'-O-methyl nucleotide
  modified_base 84: mod_base = OTHER; note = 2'-O-methyl nucleotide
  modified_base 85: mod_base = OTHER; note = 2'-O-methyl nucleotide
  modified_base 86: mod_base = OTHER; note = 2'-O-methyl nucleotide
  modified_base 87: mod_base = OTHER; note = 2'-O-methyl nucleotide
  modified_base 88: mod_base = OTHER; note = 2'-O-methyl nucleotide
  modified_base 89: mod_base = OTHER; note = 2'-O-methyl nucleotide
  modified_base 90: mod_base = OTHER; note = 2'-O-methyl nucleotide
  modified_base 91: mod_base = OTHER; note = 2'-O-methyl nucleotide
  modified_base 92: mod_base = OTHER; note = 2'-O-methyl nucleotide
  modified_base 93: mod_base = OTHER; note = 2'-O-methyl nucleotide
  modified_base 94: mod_base = OTHER; note = 2'-O-methyl nucleotide
  modified_base 95: mod_base = OTHER; note = 2'-O-methyl nucleotide
  modified_base 96: mod_base = OTHER; note = 2'-O-methyl nucleotide
  modified_base 97: mod_base = OTHER; note = 2'-O-methyl nucleotide, phosphorothioate linkage
  modified_base 98: mod_base = OTHER; note = 2'-O-methyl nucleotide, phosphorothioate linkage
  modified_base 99: mod_base = OTHER; note = 2'-O-methyl nucleotide, phosphorothioate linkage
  modified_base 100: mod_base = OTHER; note = 2'-O-methyl nucleotide
  source 1..100: mol_type = other RNA
gagctgcagctgaatcacacgttttagagctagaaatagcaagttaaaataaggctagtccgttatcaacttgaaaaagtggcaccgagtcggtgctttt

SEQ ID NO: 1010 - RNA, 91 nt, synthetic construct
  misc_feature 1..91: note = Synthetic
  modified_base 1: mod_base = OTHER; note = 2'-O-methyl nucleotide, phosphorothioate linkage
  modified_base 2: mod_base = OTHER; note = 2'-O-methyl nucleotide, phosphorothioate linkage
  modified_base 3: mod_base = OTHER; note = 2'-O-methyl nucleotide, phosphorothioate linkage
  modified_base 29: mod_base = OTHER; note = 2'-O-methyl nucleotide
  modified_base 30: mod_base = OTHER; note = 2'-O-methyl nucleotide
  modified_base 31: mod_base = OTHER; note = 2'-O-methyl nucleotide
  modified_base 32: mod_base = OTHER; note = 2'-O-methyl nucleotide
  modified_base 33: mod_base = OTHER; note = 2'-O-methyl nucleotide
  modified_base 34: mod_base = OTHER; note = 2'-O-methyl nucleotide
  modified_base 35: mod_base = OTHER; note = 2'-O-methyl nucleotide
  modified_base 36: mod_base = OTHER; note = 2'-O-methyl nucleotide
  modified_base 37: mod_base = OTHER; note = 2'-O-methyl nucleotide
  modified_base 38: mod_base = OTHER; note = 2'-O-methyl nucleotide
  modified_base 39: mod_base = OTHER; note = 2'-O-methyl nucleotide
  modified_base 40: mod_base = OTHER; note = 2'-O-methyl nucleotide
  modified_base 88: mod_base = OTHER; note = 2'-O-methyl nucleotide, phosphorothioate linkage
  modified_base 89: mod_base = OTHER; note = 2'-O-methyl nucleotide, phosphorothioate linkage
  modified_base 90: mod_base = OTHER; note = 2'-O-methyl nucleotide, phosphorothioate linkage
  modified_base 91: mod_base = OTHER; note = 2'-O-methyl nucleotide
  source 1..91: mol_type = other RNA
ctcaccccaagtgactcgaggttttagagctagaaatagcaagttaaaataaggctagtccgttatcacgaaagggcaccgagtcggtgct

SEQ ID NO: 1011 - RNA, 91 nt, synthetic construct
  misc_feature 1..91: note = Synthetic
  modified_base 1: mod_base = OTHER; note = 2'-O-methyl nucleotide, phosphorothioate linkage
  modified_base 2: mod_base = OTHER; note = 2'-O-methyl nucleotide, phosphorothioate linkage
  modified_base 3: mod_base = OTHER; note = 2'-O-methyl nucleotide, phosphorothioate linkage
  modified_base 29: mod_base = OTHER; note = 2'-O-methyl nucleotide
  modified_base 30: mod_base = OTHER; note = 2'-O-methyl nucleotide
  modified_base 31: mod_base = OTHER; note = 2'-O-methyl nucleotide
  modified_base 32: mod_base = OTHER; note = 2'-O-methyl nucleotide
  modified_base 33: mod_base = OTHER; note = 2'-O-methyl nucleotide
  modified_base 34: mod_base = OTHER; note = 2'-O-methyl nucleotide
  modified_base 35: mod_base = OTHER; note = 2'-O-methyl nucleotide
  modified_base 36: mod_base = OTHER; note = 2'-O-methyl nucleotide
  modified_base 37: mod_base = OTHER; note = 2'-O-methyl nucleotide
  modified_base 38: mod_base = OTHER; note = 2'-O-methyl nucleotide
  modified_base 39: mod_base = OTHER; note = 2'-O-methyl nucleotide
  modified_base 40: mod_base = OTHER; note = 2'-O-methyl nucleotide
  modified_base 88: mod_base = OTHER; note = 2'-O-methyl nucleotide, phosphorothioate linkage
  modified_base 89: mod_base = OTHER; note = 2'-O-methyl nucleotide, phosphorothioate linkage
  modified_base 90: mod_base = OTHER; note = 2'-O-methyl nucleotide, phosphorothioate linkage
  modified_base 91: mod_base = OTHER; note = 2'-O-methyl nucleotide
  source 1..91: mol_type = other RNA
gagctgcagctgaatcacacgttttagagctagaaatagcaagttaaaataaggctagtccgttatcacgaaagggcaccgagtcggtgct

SEQ ID NO: 1012 - RNA, 91 nt, synthetic construct
  misc_feature 1..91: note = Synthetic
  modified_base 1: mod_base = OTHER; note = 2'-O-methyl nucleotide, phosphorothioate linkage
  modified_base 2: mod_base = OTHER; note = 2'-O-methyl nucleotide, phosphorothioate linkage
  modified_base 3: mod_base = OTHER; note = 2'-O-methyl nucleotide, phosphorothioate linkage
  modified_base 29: mod_base = OTHER; note = 2'-O-methyl nucleotide
  modified_base 30: mod_base = OTHER; note = 2'-O-methyl nucleotide
  modified_base 31: mod_base = OTHER; note = 2'-O-methyl nucleotide
  modified_base 32: mod_base = OTHER; note = 2'-O-methyl nucleotide
  modified_base 33: mod_base = OTHER; note = 2'-O-methyl nucleotide
  modified_base 34: mod_base = OTHER; note = 2'-O-methyl nucleotide
  modified_base 35: mod_base = OTHER; note = 2'-O-methyl nucleotide
  modified_base 36: mod_base = OTHER; note = 2'-O-methyl nucleotide
  modified_base 37: mod_base = OTHER; note = 2'-O-methyl nucleotide
  modified_base 38: mod_base = OTHER; note = 2'-O-methyl nucleotide
  modified_base 39: mod_base = OTHER; note = 2'-O-methyl nucleotide
  modified_base 40: mod_base = OTHER; note = 2'-O-methyl nucleotide
  modified_base 88: mod_base = OTHER; note = 2'-O-methyl nucleotide, phosphorothioate linkage
  modified_base 89: mod_base = OTHER; note = 2'-O-methyl nucleotide, phosphorothioate linkage
  modified_base 90: mod_base = OTHER; note = 2'-O-methyl nucleotide, phosphorothioate linkage
  modified_base 91: mod_base = OTHER; note = 2'-O-methyl nucleotide
  source 1..91: mol_type = other RNA
cagctacgtatccatcgtgagttttagagctagaaatagcaagttaaaataaggctagtccgttatcacgaaagggcaccgagtcggtgct

SEQ ID NO: 1013 - RNA, 20 nt, synthetic construct
  misc_feature 1..20: note = Synthetic
  source 1..20: mol_type = other RNA
ggcctcggcgctgacgatct

SEQ ID NO: 1014 - RNA, 100 nt, synthetic construct
  misc_feature 1..100: note = Synthetic
  source 1..100: mol_type = other RNA
ggcctcggcgctgacgatctgttttagagctagaaatagcaagttaaaataaggctagtccgttatcaacttgaaaaagtggcaccgagtcggtgctttt

SEQ ID NO: 1015 - RNA, 100 nt, synthetic construct; identical to SEQ ID NO: 1014
  misc_feature 1..100: note = Synthetic
  modified_base 1: mod_base = OTHER; note = 2'-O-methyl nucleotide, phosphorothioate linkage
  modified_base 2: mod_base = OTHER; note = 2'-O-methyl nucleotide, phosphorothioate linkage
  modified_base 3: mod_base = OTHER; note = 2'-O-methyl nucleotide, phosphorothioate linkage
  modified_base 29: mod_base = OTHER; note = 2'-O-methyl nucleotide
  modified_base 30: mod_base = OTHER; note = 2'-O-methyl nucleotide
  modified_base 31: mod_base = OTHER; note = 2'-O-methyl nucleotide
  modified_base 32: mod_base = OTHER; note = 2'-O-methyl nucleotide
  modified_base 33: mod_base = OTHER; note = 2'-O-methyl nucleotide
  modified_base 34: mod_base = OTHER; note = 2'-O-methyl nucleotide
  modified_base 35: mod_base = OTHER; note = 2'-O-methyl nucleotide
  modified_base 36: mod_base = OTHER; note = 2'-O-methyl nucleotide
  modified_base 37: mod_base = OTHER; note = 2'-O-methyl nucleotide
  modified_base 38: mod_base = OTHER; note = 2'-O-methyl nucleotide
  modified_base 39: mod_base = OTHER; note = 2'-O-methyl nucleotide
  modified_base 40: mod_base = OTHER; note = 2'-O-methyl nucleotide
  modified_base 69: mod_base = OTHER; note = 2'-O-methyl nucleotide
  modified_base 70: mod_base = OTHER; note = 2'-O-methyl nucleotide
  modified_base 71: mod_base = OTHER; note = 2'-O-methyl nucleotide
  modified_base 72: mod_base = OTHER; note = 2'-O-methyl nucleotide
  modified_base 73: mod_base = OTHER; note = 2'-O-methyl nucleotide
  modified_base 74: mod_base = OTHER; note = 2'-O-methyl nucleotide
  modified_base 75: mod_base = OTHER; note = 2'-O-methyl nucleotide
  modified_base 76: mod_base = OTHER; note = 2'-O-methyl nucleotide
  modified_base 77: mod_base = OTHER; note = 2'-O-methyl nucleotide
  modified_base 78: mod_base = OTHER; note = 2'-O-methyl nucleotide
  modified_base 79: mod_base = OTHER; note = 2'-O-methyl nucleotide
  modified_base 80: mod_base = OTHER; note = 2'-O-methyl nucleotide
  modified_base 81: mod_base = OTHER; note = 2'-O-methyl nucleotide
  modified_base 82: mod_base = OTHER; note = 2'-O-methyl nucleotide
  modified_base 83: mod_base = OTHER; note = 2'-O-methyl nucleotide
  modified_base 84: mod_base = OTHER; note = 2'-O-methyl nucleotide
  modified_base 85: mod_base = OTHER; note = 2'-O-methyl nucleotide
  modified_base 86: mod_base = OTHER; note = 2'-O-methyl nucleotide
  modified_base 87: mod_base = OTHER; note = 2'-O-methyl nucleotide
  modified_base 88: mod_base = OTHER; note = 2'-O-methyl nucleotide
  modified_base 89: mod_base = OTHER; note = 2'-O-methyl nucleotide
  modified_base 90: mod_base = OTHER; note = 2'-O-methyl nucleotide
  modified_base 91: mod_base = OTHER; note = 2'-O-methyl nucleotide
  modified_base 92: mod_base = OTHER; note = 2'-O-methyl nucleotide
  modified_base 93: mod_base = OTHER; note = 2'-O-methyl nucleotide
  modified_base 94: mod_base = OTHER; note = 2'-O-methyl nucleotide
  modified_base 95: mod_base = OTHER; note = 2'-O-methyl nucleotide
  modified_base 96: mod_base = OTHER; note = 2'-O-methyl nucleotide
  modified_base 97: mod_base = OTHER; note = 2'-O-methyl nucleotide, phosphorothioate linkage
  modified_base 98: mod_base = OTHER; note = 2'-O-methyl nucleotide, phosphorothioate linkage
  modified_base 99: mod_base = OTHER; note = 2'-O-methyl nucleotide, phosphorothioate linkage
  modified_base 100: mod_base = OTHER; note = 2'-O-methyl nucleotide
  source 1..100: mol_type = other RNA

SEQ ID NO: 1016 - RNA, 91 nt, synthetic construct; identical to SEQ ID NO: 344
  misc_feature 1..91: note = Synthetic
  source 1..91: mol_type = other RNA

SEQ ID NO: 1017 - RNA, 91 nt, synthetic construct; identical to SEQ ID NO: 346
  misc_feature 1..91: note = Synthetic
  source 1..91: mol_type = other RNA

SEQ ID NO: 1018 - RNA, 106 nt, synthetic construct
  misc_feature 1..106: note = Synthetic
  variation 1..25: note = n is a, c, g, or u
  variation 21..25: note = n may be present or absent
  source 1..106: mol_type = other RNA
nnnnnnnnnnnnnnnnnnnnnnnnngttgtagctccctgaaaccgttgctacaataaggccgtcgaaagatgtgccgcaacgctctgccttctggcatcgtttatt

SEQ ID NO: 1019 - RNA, 102 nt, synthetic construct; identical to SEQ ID NO: 702
  misc_feature 1..102: note = Synthetic
  variation 1..25: note = n is a, c, g, or u
  source 1..102: mol_type = other RNA

SEQ ID NO: 1020 - RNA, 20 nt, synthetic construct
  misc_feature 1..20: note = Synthetic
  source 1..20: mol_type = other RNA
ggccacggagcgagacatct

SEQ ID NO: 1021 - RNA, 100 nt, synthetic construct
  misc_feature 1..100: note = Synthetic
  source 1..100: mol_type = other RNA
ggccacggagcgagacatctgttttagagctagaaatagcaagttaaaataaggctagtccgttatcaacttgaaaaagtggcaccgagtcggtgctttt

SEQ ID NO: 1022 - RNA, 100 nt, synthetic construct; identical to SEQ ID NO: 1021
  misc_feature 1..100: note = Synthetic
  modified_base 1: mod_base = OTHER; note = 2'-O-methyl nucleotide, phosphorothioate linkage
  modified_base 2: mod_base = OTHER; note = 2'-O-methyl nucleotide, phosphorothioate linkage
  modified_base 3: mod_base = OTHER; note = 2'-O-methyl nucleotide, phosphorothioate linkage
  modified_base 29: mod_base = OTHER; note = 2'-O-methyl nucleotide
  modified_base 30: mod_base = OTHER; note = 2'-O-methyl nucleotide
  modified_base 31: mod_base = OTHER; note = 2'-O-methyl nucleotide
  modified_base 32: mod_base = OTHER; note = 2'-O-methyl nucleotide
  modified_base 33: mod_base = OTHER; note = 2'-O-methyl nucleotide
  modified_base 34: mod_base = OTHER; note = 2'-O-methyl nucleotide
  modified_base 35: mod_base = OTHER; note = 2'-O-methyl nucleotide
  modified_base 36: mod_base = OTHER; note = 2'-O-methyl nucleotide
  modified_base 37: mod_base = OTHER; note = 2'-O-methyl nucleotide
  modified_base 38: mod_base = OTHER; note = 2'-O-methyl nucleotide
  modified_base 39: mod_base = OTHER; note = 2'-O-methyl nucleotide
  modified_base 40: mod_base = OTHER; note = 2'-O-methyl nucleotide
  modified_base 69: mod_base = OTHER; note = 2'-O-methyl nucleotide
  modified_base 70: mod_base = OTHER; note = 2'-O-methyl nucleotide
  modified_base 71: mod_base = OTHER; note = 2'-O-methyl nucleotide
  modified_base 72: mod_base = OTHER; note = 2'-O-methyl nucleotide
  modified_base 73: mod_base = OTHER; note = 2'-O-methyl nucleotide
  modified_base 74: mod_base = OTHER; note = 2'-O-methyl nucleotide
  modified_base 75: mod_base = OTHER; note = 2'-O-methyl nucleotide
  modified_base 76: mod_base = OTHER; note = 2'-O-methyl nucleotide
  modified_base 77: mod_base = OTHER; note = 2'-O-methyl nucleotide
  modified_base 78: mod_base = OTHER; note = 2'-O-methyl nucleotide
  modified_base 79: mod_base = OTHER; note = 2'-O-methyl nucleotide
  modified_base 80: mod_base = OTHER; note = 2'-O-methyl nucleotide
  modified_base 81: mod_base = OTHER; note = 2'-O-methyl nucleotide
  modified_base 82: mod_base = OTHER; note = 2'-O-methyl nucleotide
  modified_base 83: mod_base = OTHER; note = 2'-O-methyl nucleotide
  modified_base 84: mod_base = OTHER; note = 2'-O-methyl nucleotide
  modified_base 85: mod_base = OTHER; note = 2'-O-methyl nucleotide
  modified_base 86: mod_base = OTHER; note = 2'-O-methyl nucleotide
  modified_base 87: mod_base = OTHER; note = 2'-O-methyl nucleotide
  modified_base 88: mod_base = OTHER; note = 2'-O-methyl nucleotide
  modified_base 89: mod_base = OTHER; note = 2'-O-methyl nucleotide
  modified_base 90: mod_base = OTHER; note = 2'-O-methyl nucleotide
  modified_base 91: mod_base = OTHER; note = 2'-O-methyl nucleotide
  modified_base 92: mod_base = OTHER; note = 2'-O-methyl nucleotide
  modified_base 93: mod_base = OTHER; note = 2'-O-methyl nucleotide
  modified_base 94: mod_base = OTHER; note = 2'-O-methyl nucleotide
  modified_base 95: mod_base = OTHER; note = 2'-O-methyl nucleotide
  modified_base 96: mod_base = OTHER; note = 2'-O-methyl nucleotide
  modified_base 97: mod_base = OTHER; note = 2'-O-methyl nucleotide, phosphorothioate linkage
  modified_base 98: mod_base = OTHER; note = 2'-O-methyl nucleotide, phosphorothioate linkage
  modified_base 99: mod_base = OTHER; note = 2'-O-methyl nucleotide, phosphorothioate linkage
  modified_base 100: mod_base = OTHER; note = 2'-O-methyl nucleotide
  source 1..100: mol_type = other RNA

SEQ ID NO: 1023 - protein, 5 aa, synthetic construct
KTRAD